United States Patent Application Publication US 2022/0290142 A1 - sequence listing, part 26

SEQ ID NO: 15889 - DNA, 64560 bp, Homo sapiens
ggaggcggtggtgtcccggctgcggggtaggagtccgcggcagcctccgggtaagccaagcgccgcgcagtgctgagttcccgcacgccgcagagccatggagatcggcaccgagatcagccgcaagatccgggtgaggcccgtgccggtcgggggtgggaagccaggtctcggcgagcgggcggttgtcaggagtaacggggactgtgggcccgggtggacgccgcggcctggcctccgctggacgctcctggcgggctgcggctcctcctcgtccaggccgcctcggccctggggacatttgcggcctcggagcgtggctgcggctgaagtagccgccgggaaatggaaggacaggcgcaggcccggctggagccaccaccgcggcgcacggcgccgctttggatccgctgcgggaggtgggcgccgcggggctggggctggagctggagtggggtgcggggtggggggcggtgcaggcgaggctcctcccagcccccgcccgggggatccgaggtgcgcgcaccagcaaagtggcctcagccgctgcagagtccggtcttgttttcctagagccgcctttctcacatgcacgtttgctctttttctctcagagtgccattaaggggaaattacaagaattaggagcttatgttggtaagtgtttttttggttgttagtcttacagaatttagagtttgcagctaatagaattttagtgaatgcgtatttctcaccgtactttggacattgggagagactcccttctaccttcttcaaatcttatactccctggttacttctttatcatctttttgcaaccttgttttttttctcccaaacctccttctgttatggtgttttgaaatttagtttcctccgttaaggctctgtttgaccgaattttattttatgtttttcctattctctctctctctcattttaaattctagggacgggtctcgctacgttgcccaggctggtcttaactcctgggctcaagcaattatctgaccttagcctccctaggtgctgggagtgcggggattactggtgtgagccaccatgcctgtttaaagtttcctattcttgttactttcctcttgacatttgtttttagaactctgatgttggatgtgaatgtttgatgctttctggcatttgcttctgtaatggttcagtgagttttattttccgatctctttatgttttccctctctctctgaaacagtaaggctttttccgtctctttattcttttataatttgagtgtttactctgggtcaggtactgtgcttaactattgtatatgtattaactcaggataatccctacgagaatcctggaaggtaagtggcagtatctttgactgtgtaaacaaggaaactgaggctttgcctacttgagcaaggttttatggtttgcccccaaagctggtgcctcctataaaaataatagctaccactaatgacagtggttctcaaagtgtgggagactccaagggcctctgaagtcaaaactgttttcatattaatactaagatggtatttgttatttttcactgtggtggtggtgtttggattgtgtaaaactaatggttgataaaacttgtcagcatagtaacaccataatgaaatcatattcaaatcactccccccttgtagtttttttctttttgagccaattacacttaaaatgtcattgatgaagatgtgaagtccagggtttacaaaatattttttatcttcttagtattcagtgcgaggaaatagaaatgctcataaaacatttttattgtatactgaaatacgattgttctgaggaaaatcattttagttgagaactaagctagccacctctttcagggaacatcatttttaacttcaaagtactgacaaactggttacatacactaggatatttggcagatatttacttgaaagtgagcaaagaaaagaatccatagtctttgttgccaatcacatgtgagctttcaaatgaaaattagaattttggaaaatctgagcctgcctccatgaatttcacagcttcccagtacttaaaaaatttctgattaaataaatggtgatttaaaaaaaatttgttattattattattttttttgagatggaatttcactcgttgcccaggctggagtgcagtggcgtgatcttggctcactgcaagctctgcctcccgggttcaagcgattcttttgcctcagcctcccgagtagctgggattacaggcatctgccactacacccagctaattttttgtatttttagtagagacagggtttcaccatgttggccaggctggtctcaaactcctgaccttgtgattcgcgtgcctcagcctcccaaagtgctgggattacaggtgtcagccactgcatccggccaactcaatggcgatattaaaaaataattattttatactgcataatgaaatatatcaacgtgtcagtggtttttgtagctaagtgaaccaatcttttctaaataaccaatgcataatattacaaaattatgcagtggattaaagatttatttaaactctggggtgggtcagtggatttttgtgcaacagttcaaaaaggtcattgacgtatttgacattccacgttgctttaacatttaataagctaccacttgtttagttttggtgtagtgtcacagaagaatatccaccttatctgaaaagactatcagaatactcctttttcaactgcatatctgtgagaccagattttttcatattcttcagtcataagcacatagaacaagatatataaaaatatgaaacaaggccagtctttgcagtaaatttttctttttcttttttttgagatggggtctcactctgtggttcgggctggagtgcagtggtgcaatcttggctcactgcaacctccgcctcccaggttcaagcaattctcctgcctcagcttcccgagtagctgggattacaggcacctgccaccaccccgccccccccccccggctaatttttgtgtttttagtggagacggtgtttcaccatgttggccaggctgatctcgaactcctgaccttaggtgatccacttgtctcagcctcccagagtgctgggattacaggtgtgagccactgtgccttgcctaaatttttttttggaaaatttaataatgttacttgtgttaatataattggatttgtgattaacatgtgatggatttattttttaatgaattaataaatactttttaattaaaaatgatcagttctaattttgaacaccataaataatagaacctgcataaaccaaagaaggggcccaagaccaaacagtttgagaattggtaatttatggagtacttaccaccatttgctgggcactttcataaacgatttgttgtcaggattgttggaagactaacagatgagagaattgaggctcagagaaaataaagctgaaccaagatttatttattcttttattctttcaacacttgaactgcattttttatagttttctttgaaacaaaaaaagtacttctgaaatgaacctttctgcctgcatagaaatattacaagtatttaaggtattaaagaaatttgtcacagcatggtggttcacgcctgtaatcacagcactttgggaggccgaggtgggtggatcacttgaggtcaggagttcgagaccagcctagtcaacatgctgaaacctggtgtctactaaaaatacaaacattagctgggtgtggtggcaggtgcctgtaatcccagctactcgggaggctgaggcaggagaatcgcttgaacccaggaagcagagcttgcagtgagccgagattgtgccactacactccaacctgggagacagagcaagactctgtcgtaaaagaaaaaaaaaaaaaagagaactggaatggagttttgagggtcagagattagagttcctgataacagcttttgcttccttatcttcttagtgaggtttttgtttttttgttcttttaaatcctagacctcactctcataatcactgtaggattaccactaggagggtgttttttggcttcttttatttattttatttatttatttttttttgagacagagtcttgctctgttgcccaggctggagtgcagtggcaggatctgagcgcactgcaagctccgcctcctgggttcacaccattctcctgcctcggcctcccgagtagctgagactataggcgctcaccaccacacccggctaattttttgtatttttagtagagacagggtttcactgtgttagccaggatggtctcaatctcctaaccttgtgatctgcccaccttggcctcccaaagtgctgggattacaggcatgagccaccgcgcctggccttttttcttttttttttttttttatcctagacctcacccttataatcattgtaggattaccactgtgagggtaaaaccgtgcattgagttgacattatttaatgttaaaattgatttttttaaatgatgtggagcttttgggtctatttgtttattcgatgttgctacaagtttgttactgtgagtaattgaaacctgcctttagcaagggtaaagatgttcacttgagaaatgagtgttattttgaaactttgcaaattaaaactaaacaaaactcaattctttttcttggggaatgttcaaatatttcccataagcttctttgaaattaataagcattattaaaaagattcaaggaagtgaatgcatgctcaagtttgaccctataattcagaatgtttagttttgtaagtatcaattattcttaatttccattcttctagtatttgaaatacctgtggaatgaagagaaaaaaattaaagctaagccatcttgtccaatgtaattccagtagagctctgcgactctaaagcttagagctacatctatattttcaagcacatcaactttaagaagaaagttttgaggaaacaaagttttgatctacctttccttttaaatagatgaagaacttcctgattacattatggtgatggtggccaacaagaaaagtcaggaccaaatgacagaggatctgtccctgtttctagggaacaacacaattcgattcaccgtatggtatgtttctgaatttttgtgcctcagaccaaagtttggcacaagcctgagttgatattctgtccaaagagaggttcttgacacttgagttaggtttactttggagaggcagtttgtgagtgatgagagcacagcctctgtattagtccattttcacagtgctatgaagaaatacccgagactgggtaatttctaaaagaaagaggtttaattgactcagagttccacatggctggggaggccccaggaaggggaagcaagcaccttcttcacaagtcgacaggaaagagaagagtgaaggaggaacttccagagacttatataaaatcatcagatcttgtgagaactcactgtctcttgagaactcgggaactcactgtctcttgagaactcactatcatgagaacatcatgggggaaaccacccccatgacccagtcacctccctcccttgacaggtggggattacaattcaatataagatttgggtggggacacagagccaaaccttatcagcctctgaagccagacagccaaagttgaatcctggctgtgtcttgccttggtttctctagctataaaatggaaatagtacagccacttgctttataaaattattattgaggatcaaatgggctaatatgtgtaaagtacttataggtgtccctagcattttcctaaggaattcttagtatatgtcggctatacttaatatgtttcttttgtaaacttctatatctttttttttgagacagggtcttgctctgtcaccaggctggagcacagtggtacaatcatggctcgctgcagcctcgatctcctggtttcaagtgatcatcccattgcagtcccctccttcctgaactcccatgcctgactaatttttaaattttttgttcagacagggtcttagtatgttgccctggatgctcttgaactcctgggctcaagcagtcctcctgccttggccttcagaagtcttggggttataggtatgagccactgcacctggccagcttctgtatcttatagttccttttcccccaccaaaaccagttacagatgtttttttgaactgggttggcttcttacattgccttttacaatgagttacctttagagggcaaggttttctgtttctcacttttctgtttcttactttttaagctttttgttaaactcacaccttcattttgagtaataattgtagtgtaatgttacagcatattttgagattataagtttttttaagtttggaattttaaaataggcaactttgcttttatacataaattactgttatatgcctttagttgagaatactgactagaagagtaagattcaacttaagatgctaggtcctggtaccaggtttgaggtaaagtgaggatgagggctggaggataatgatgtagctgagaatagacagacgaaatactttattaggcttctcaggctaggaactaccagttaccgtgaaaggtgatgatgtagcagaagtgagcaagtggcctgccgaatttgagtgcaagaggaggcactgagtggggagatgagcctggttaagttcttgcctttataccaaaggtcgtcttcaaggtgtttttgcccaagtaggcaactgtatgcttatcaaccgtcttgaaattctgcacagaattctctgggtttatacattgcacaaatttgaagaacattgtatagtggtcatcagttgttatgatacactgctgcctcactgtgggtgacccaacccatttgttacaatttgtccccagaggttattccctcccagccccccacaaaaaaagactgtgggtcttttgactgggaaaattaccattattgtgagtactatttttttttctaaagcgaccgagtagatccttttctccgataacttgatagaatacttagatttttaaaacagactaccaaatgaatttaaaaccaaattaattcaacattctcatctggccataaattgagttctttaacatgtagtgaagcaaagggtgatgtccccattttggcactttgctttcttaagttagtgttcattaacaccagccccaaacagactattgtgattatttggagccttgaagtaattgtgtccgtggggacagtagcatgtgactagggttctcattgaaacatgaggtttctggcatattttgagaggtactgggaagggatgtaaggcaaagtacctcatttataactaccaaaacaggttatgttacaagcaagattacagccttacagcatcagttttgaaagtaatagagtgaaatgatatagcatagtttgagattataacttgttttaacctctcagaattaagttgtccaagacaccatctagtttaagcagttaatataagctgcttaaatggtggtaataataagcaatattacatgtttatgatacttgttttactgtaagctacagtaaatctttagtacttacaaacagggtgacatattttgtagactaagactggtcagatgatattctttcccatatttttgcagaggctagatgttgaaaacagtgaagaaaaaaatacaattttttattgacttctgtaggatttatacaaagcccttttttaaaaatgtgaagtttgaaagttcataccatttattcactaaatacagtttatcagtatttatctcagctaggtgcggtggctcacgcccgtaatctcaacactttgggaggctgaggcaggtggttctctcaagtccaggacttcaagaccagcctggacaacacagtgaaaccccatctctatttaaaaataataaaaatataaaaaaatttaaaaaattatctctgaatataatgtcataaatttagagtgacagttgaaatgaaatctttcttaacagaaggtttatttttgttttttgtttttttcctcaggcttcatggtgtattagataaacttcgctctgttacaactggtaagattcataacttttttttttaatttctgcttgctatggcatatgatttgtttctttctaaagtcatagtgctttgggaaaaacccatcaatttcaaaacggttcatttgaacttttttagaaagcacatacttttatgaacttaagagcagtaaatttaacataattcaaagataatttaagtgtgggagagggagcagtgcactttatccgaaggaaataattacatatatgtgcaaagatttagcctcaaggatatttcagtattttataattgaaaacaatttaaaagttcagtcataataaacgaaattgttgtattaccatgtgtggaataatatttaactattaaaaataatgttgtggaagaataacagaatatacacgcataagatacatgttttaaaaaatgtgtatatatgctcttcccccgaaaaatcacctttgagataattggtgatttttattatatttttaaaattttctacaataaacatactgcttttgaattggtgatgaggaaggaaacgacttaaagtaataaaaatagatggccgggcacggtggctcacgcctgtaatcccagcattttgggaggccaaggtgggcggatcatgggctcaggagatggagaccatcttggccaaccaacatggtgaatctccgtctctactaaaaatacaaaaattagccaggcatcgtggcacatgcctgtaatcccagctacttgggaggccggggcaggagaatcgcttgaaccagggatttggaggttgcagggagccgagaacgcgccactgccctccagcctggcgacagagcgagactccatctcaaaaataaataaataaataaaaataagaaataaaaatagattaaaaggactgtatttttcttttcagaaccctctagtctgaagtcttctgataccaacatctttgatagtaacgtgccttcaaacaagagcaatttcagtcggggagatgagaggaggcatgaagctgcagtgccaccacttgccattcctagcgcgagacctgaaaaaagagattccagagtttctacaagttcgcaggagtcaaaaaccacaaatgtcaggtaagagtctggtgtagacctgctgggggcagatggctctgtgtatgtgacatttatattagtttttatatctttcagtttgctgttctcagcaatttttagaaacaatgaagtgatcgtgagtagttttttgaataaaataatggataagatctaagtatgattatcttttatcacaaatttagtaaatcaaagttgaaagaaagtgcaatttcaaagcagttttgaatggaatatgtaaagggagtatcctcagttttttcattgaaatttttcaagtaaacattctttaaagatttggtgataattgccctaatttggctgtaatacattttgttgttcttttaaatagacagacttacgatgatggagctgcaacccgactaatgtcaacagtgaaacctttgagggagccagcaccctctgaagatgtgattgatattaagccagaaccagatgatctcattgacgaagacctcaactttgtgcaggagaatcccttatctcagaaaaaacctacagtgacacttacatatggttcttctcgcccttctattgaaatttatcgaccacctgcaagtagaaatgcagatagtggtgttcatttaaacaggttgcaatttcaacagcagcagaatagtattcatgctgccaagcagcttgatatgcagagtagttgggtatatgaaacaggacgtttgtgtgaaccagaggtgcttaacagcttagaagaaacgtatagtccgttctttagaaacaactcggagaaaatgagtatggaggtttgtatgtacttttaaattctggcttaggctaaaaatcggcagttcttgataccaaataatatatgaagtaactaaacacatattccaaggctgggcacagtggctcacacctgtaatcccaggactttgggaggccgaggcgggtggatcacgaggtcaggagattgagaccatcctggctaacacggtgaaaccccgtctctactaaaaatacaaaaaattagccaggcatggtggcaggcgcctgtagtcccagctactcgggaggctgaggcaggagaatggcgtgaacctgggaggcggagcttgcactgagccaagatcgtgccactgcactccagcctgggcaacagagcgagactccgtctcaaccaaaaaagaaaaaacaaaaaacaaaaaaaacacatattccaaatttattttattttattttactttttgagaaggagtttcactcttgttgcccaggctggagtgtgatggcgcgatctcaactcactgcaacctccacctcctgggttcaagcgattctcctgcttcagcctcccgagtagctggtattacccgccaccatgcctggctaattttttgtatttttagcaaagacagggtttcaccgtgttggccaggctggtcttgaaatcctggccctgtgatccacccaccttgatcttggctcactgcaacctgtgcttcccaggttcaagtgattcttctgattcagcctcctgaatagctgggattacaggtgtgtactaccacgaccagctaatttttgtatttttagtagagatggtgtttcaccatgttggaccaggctggtcttgaactcctgacctcaggtgatctgccctccttggcctcccaaagtgttgggattacaggcatgtaccatggcgcctggccccaagtttatttttaaattgttttatctgctgtttctcatgctataccagattttcttccccatggcttgctcctagagttcttttgtatcacatctgtatacctttttgggatttccagcatttgagatattaatcttaaattaatttggggggtttcaatcaattttagattgttcatggtaattgctagtgagcaaccaattaactctgttttattagtttcctcaatagcactatatgcagctgttgataaaataaatgtaaagttctaatttttgttttagctaaaggttgactgttagggataatatttatatttatagtatttatttatttatttattttgatacggtgtctcactctgtcgcccaggctggagtgcagtggcatgatcttggctccctacatcctccacctcccgggttcaagtgagtcttctgcctcagcctcccgagtagctcggactacaggcacatgccgccacgctcagctaatttttgtatttttatagagacagggtttcaccatattggccaggctggtctcgaaatcctgaccttgtgatccgcccacttcggccttccaaagtgctaggattacagatgtgagccaccacacccagcctcatatttatatttttacataaaaccaagaaatactctgtgaatttctcatattactgtgtactgtttttttcttaaaatggaaacattttgtggtagaactcttgttattttctgagattaggtaagcataaattttatctgattgcaggatgaaaactttcggaagagaaagttgcctgtggtaagttcagttgttaaagtaaaaaaattcaatcatgatggagaagaggaggaagaagatgatgattacgggtctcgaacaggaagcatctccagcagtgtgtctgtgcctgcaaagcctgaaaggaggtaccttgaacatggctgtaaattaatctttaactgccttggtggagtcttcctgatttattgaagagaataatcacgaaaataatttttgtttgttttttgagacggagtctcgctctgtcaaccaggctggagtgcagtgccacgatctcggctcactgcaacctctgcctcccaggttcaagtgattctcctgattgagcctcctgaatagctgggattataggtgtgcactaccatgaccagctaatttttgtatttttagtagagatggtgtttcaccatgttggaccaggctggtctcgaactcctgacctcaggtgatctgccctcctcagcttcccaaagtgttgggattacaggcatgagccaccgcacctgacataaatatttaatgtaataccgtgtaagacttttccattgggttttgagaaacacgttaatgagagaaattgcttaacattggagaggattgcagagaatattgactaatatggtggggtgaggaggaacaacatcaattaagattcagatttattatttaaaaaaactaaaaggggcctaggcatggtggctcatgcctgtacctagcactttgggaggctgaggcaggaggattgcttgagaccaggagttcgagaccagcctgggcgatgtaatgagtctttgtctcttaaaaaaaattaaaataaattagttggtcattgtggcaggcacctgtagtcctggactggagaggtggatgtggaagcattgcttgagcctagaagtttaaggctgcagtgacatcacactccatcctgggtgagagagtaagagtctgtctaaaaaaaaaaataaggttccagtgtagttggcattttctaaaaactgcagctagtctgtttaaaacctagagaaggttgtggtaaaggcataatagatggctggcctgtgaggaactgaaatttaaagtttaataaaaatacctttcttaactcttttagaccttctcttccaccttctaaacaagctaacaagaatctgattttgaaggctatatctgaagctcaagaatccgtaacaaaaacaactaactactctacaggtaatttaaatgtattatgtttacacttggtaagacatttctgtaattcttgagtaaggtgaaaatgattgctccttaaattgtaaaataaaggtgcctgtcagatgtcaagaccaagatgaggttcccatatagaaaaatggctttaaaaggaaattgacaagtttgagaaacttcgccaactgttattggactgtagtttttcaagcaccatataatgccttttatatctttccaatgtgtgtaaaatatatagtacgtaaatattttgaagagaattttgatgaagtaggactttcatattagtagcattagattcaacattagatatgaatttacgatgtgtaaaggggagtacaattggacaatgataggtatctgaagttatagaaatttgttaaacagtagtatataaacaaggttggtttcttcccttttggcggaactcattagtagaatataaggcagagaattgactcatttgtgatgttcctgctccaattctagtggaagtactgaataattttatgagagaatataaaagtattacgttttcaaaacaggagatgaatcagctgtaagctggtcttacggaaagctgattctgaaatgcaaacaactgatgggtgtcattttgtgttgtcaaattctgtactctctggccgacctgttgtagccaatgtgtaaacttgtgttaagaagctgatggtaatgagctactctaaaaagatttaagttttgctgtggatttggtgggtgtacttacagcattgccctgcttatccactctctcgcttttttttgtgaccccccttcctaaaatgaggtaaactgtagccatcagtttttttatttgttttctttttttgaggcgaagtcttgctctgttgcccaggctggagtgcagtggtgtgatcttggcttactgcaatctctgcctcctgggtccaagcgattctcctgcctcagcctcccaagtagctgggattacaggcgcccactaccatgccaggctaatttttttgtatttttagtagaggcggggttccaccatgttggccaggctggtctcgtactcctgacctcaggtgatcacctgcctcctcggcctcccaaaatgctgggattacaagcgtgagccaccgcgcctggcaccatcagtttttgatcctgatacttgtctgtcctcttggttctcctcatccctaatttaaccttgaacacaaaattcaacaggttttggcatatagaataaagattatcaggcaaaggcgcactcttgacctaatgatatatctacatttcatttcctgatctatcagcaatattaattgtctagaatgatgagaagtttagagaagttccatgactttgaaattttctttctttacctaggttatctaaattacaatttgaaactcatataagatcatgaagctaagcttaaataaaccgcattttgttgaaaatgaatacatatgtactatattgtattcatggtatgtggttgtatggatattgtttacatatgtttggataaataggttcaggtatctatctcagtaacgtaagaaaaaatgaatggtatctatggattgaactcctcatatatatgttcttttcttttctttttcttttttttttggagacagagtctcactctgttgcccaggctggagtgcacagtggtgcaatctcggctcactgcaacctccgccttccgggtttaagcaattctcctgcctcagcctcctgagtagttgggattacaggtgtgtgccactatgcccggctagtgtttgtatttttagtagaaacgaggttttaccatgttggccaggctggtctcaaactcctgacctcaagtgatccacccaccttgcctcccaaagtgctgagattacaggcatgagccactgcgcccagcctgaactcatatgtcctaaaccaaaggaggcatttatatttaatatgacatagtcactgtggagttttgacgtattactgcatttgtatttctatcttttttgcttttatgtgaaagttccacagaaacagacacttccagttgctcccagaactcgaacttctcaagaagaattgctagcagaagtggtccagggacaaagtaggacccccagaataagtccccccattaaagaagaggaaacaaaaggagattctgtagaaaaaaatcaaggtaataacttaaatgatgtttcactctttactacagttttttcatgaggcattgaatattttccaatggatttttatgaaatattacactatgaaaaaagtgatgattaagcccagaaatagaatgagaagaataccatgaggaaggttcataccaacacttcagaaaaaaattttttttttaaagaggtagggtcttgctgtgttgcccaggcagtcctcaaactcctgggctcaagcagtcctcctgcctcagcatccttagtagctggaggtgtgtacaagtgtgtgccactgcacccagccctttctagaaatttttgaaagtctttttattgtggaaatttttaatattctcaaaaatggaaaggctagtacagtgaactctcatgaacccagtcattaagccttagttattatcagaattttgctggtctttagatagctccttcttaaagatatatttatttctgcattctttctttttctctttttgttgatcctgcccgtttacctgaacttgaaattttagttacctttaaatctcccgtctcttaagcatcctgtctctgacctcccatatgtgtcccagcaaccctaatttatcccctcgtgcctaacatacttcagtttgcttccaggttttttttttttttttttttttttgcttttttctcagctttctcccccaattcctatacaatcttttgactttgaaagtgtgtctctcatcttctgactcctttgtgaaagtatctctcccctcctcctcattacccagaactaacgctattagtttggacttttggtgtctgttatctgacccctgggcctgcacagcccttctccatgactcttcagaccttttgtctcttttgtcgtcaagaaggattcttttttcttctgtttctttttctactaagatttgaattttaagaccccaccaaaaaaatctatatgcttattatgttatttctcacatacttttcaagaaccttggaatatattttttcatttcttcaaaactgtcctttaaattgttccaggtttcatgaaaccttatgatttcagaattgtcaattctgtatttgtttcctcattgtgtctctttaaaaatttttgactgtattgttcagtttgccatgacagcgttatatactattctgataattgataggcctgaggacaagacctgtttggtccccaaacagcagataggtaccaattggaaaatgtgaatgggccaaattgagaagaggagctgaaactgaggagggattttgctcagtgcagtggcagatgaggctgatctaaaaggactgcagtggtctactccctgtggagtctgtagtgtgttgcaccaaggttttcttcaaacacaggactctacgtgagagtcttggagtggaatcagatggagcagggaaacagacaatagagaaaaggaaagaatgtcagataaaaataggagaggaaaacaataggaaatctcaaagcaaggtgccatattttttaacatcacaaaatcaacagaagaaggttgttgattctgaagttagaatagctatccaaagcaaactttcccctaaaatgaacaacagaaaagtatcaaggtcaagtcctgtgccgaattaaaagataaaagggaataaaagacaaaacagcattgtttcaatgaaagcatgctgaaaggtataccaaaaagaaatacaatttcaaagtgagctagaagacattatttaaataatacaagacaaagccaagaaaaacataaaacagaagaactttgaggctgggtgcagtggctcatgcctgtaatcccaacactttgggaggctgaggcaggaggatcacttgagactagcctgggcagcatagcaaaaccctgtctcgacaaaaaataaaaatattagctgggcaaggtatacacctgtagtcctgtctccttgggaggctgaagtgggaggattgctggagcccgggaggctgaggtgggaggattgctggagcccaggaggctgaggttgcagtgagccacgatcataccattgccctccagggaggctgaggtgggaggattgctggagcccaggaggctgaggttgcagtgagccatgatcatgccattgccatctagtttgggcgatagagtgagactgtgtctcaaaataaatgaagactaaattagaaagaactcgaaagaattagtgcgtcttaataaaataaaacatgcgtgtaatcccagcaatttgggaggccaaggcgggaggatcacttgaggccaggagttgaagatcagccagggcaacatagcaaaaccttatggctacagaaaacagcaatttaaaaataaataaaattaaaacatcttcagagaaattgaagataaaagacaagaacattttaaaagtctaaaagggctcatgagaaagtggcaaatattgataataggcaatagaaatacagtgtttttatagtaggaatctccaaagaaacaatattcagaggaacagagcaaacattaactgtctttcaagaaaactttcatgaagtgaaaacatgtttgaaactgttgtctgaaaaattgtacagtatacctgagaatatttacccagaaccataacactaagatgtattatataattaatgaaattttaaaaagaaaaaaaatgatttggacattcaggcaaaaggggcacatgacttagaagaaaaggaaaggtagattatcatcaaacttttcaacagcatcacttttgtgctggaagaaaatggactagcatatttaagatactccagaaaagaaaatgtgagccaagaatttaatgtccagcaaaagtgacctttagaagtgatccagcaccaactgttatctatatgcagaaattcagagactcattcccatgaacttttcttaggaaatctaatggaggatgagcttcagacaagtaaaagcctgttgtcctgaatttacattggaaatgtttcggaactcacagtgtattttatatataaatacatttttttctagttctgtctactagaaggcatagaaacattcatcaacccttagcatcatctgtagttcccagattgtggtcttggaatacttcctatttaaaaaactaggcttcttgggctgggtgcagttgctcacgcctgtaatcccagcactttgggaagccgaggtgggcagatcacctgaggtcaggagttcaaaagcagcctggccagtgtggtgaaaccccatctctactaaaaatacaaaaaaattagctgggtgttgtggtgtgcgcctgtagtcctagctactcgggaggctgagccaggagaatcgcttggatccgggaggcggaggttgcagtgagccaagattgtgccaccgtactccagcctgggcaacagagtgagattccgtctcaagaaaaaataaaaataaaaaaacaaagaactaggcttcttgagaaatgtctttttccaggtctggggcaggaaatgttaacatgatcctggaatggctcaacatcccagatagcaaagaagctgtcaatgaatggtagaccacgtccaaaggatgcaggcgccaacttagaggtttccattggccaaaaatggaattatttgagattcagtaggtgtaaatatcgcggtgaattaaagcccatttaaatccacaatttcataatgacattttaaaaaaataagctctaactagtcaccttctggaaggtagtagataatcattcattgtcttgaaaactgggtaaataaaataattgaacatttatgctgtcttttctgtgagaacgataccactgggtaaccccataggacaggagttggcatctgttggaaccaaaccgtgcctattcatgtatgtattgtccgtggctactttcatactacagccttagttgaatagttgcaacagaccatatagcttgcatagcctaaaatagcctaaaagatttgccaacctctgatatagtagatgagagaaacattttcttttaaaatgatttcagctgataagagaacaagatggtaggattagagttatgcttttaagagtgaaaaccagttgttttgtgcctcttgatacaaaagaacagaacttttgtcttgccaaaaatgtaaacctaagtcatcaagctcccagtccagcagtcagtttgcaagaagttgcagaggccagaggagtatgttggttgagcttcaccatgagtgtgcagccggaaaaatagtgtttgggacactgtgggttgaatagcctgagaaattgagattaaaaggcaaatcaaaggaaaataaaaggagcaggattaaattgtagtggctagggatacccagtgtgtgtgaaattataaagaacctctaggcgttaatataaaaagcacatagtggttgcttttgaagaggaccgataaagatggagcacacagagaggcttctggggtggcagatgacgttctctcttttgacttggatggtagtcagaagggtgttttgccttacaaaaattcattaagctatatgtttgtgtggttttctatactgtgttttaaaaggggataattgaaatggtgtcaggtacctttgctgatgaggagtttggtattactagatatattcacaagtgtgaagtgatactgcaagcaactgttatctgttaatgtggttactcactgttgtacggtataatctggggcaggtttttaaaatataaacatgcactcgtattggcataagttgttaattttttttcttcttttgtttgagcagatagcattctctcatttctctggtgtctttatttttactagcgcacccacctcataatatgtgtactttttgctttttgtcttgccatcagtctgtcactagaagtttattttgccgatcttttcaaagacttaacaacattattctggctttattgatttttttttttttttggtgtttttgttttctatttcattgacttgtgctttttttttattttttttttttaagaggcgaggtctcactgtcacctaggctagagtacagtggcacaattgtagctcactgcaacctcaaatgcctgggctcaaatgatcctcccacctcagggaccataggcacacgccaccacgcccagctaatgtttaagtttttttgtaaagatggagtctcactatgttgcccaggctggtctggaactcctgagctcaagcagccctcttgcctcagcctcccaaagtgctaggtttacaggtgtgagccactgcacctggcccgacttctcttttaatttatccttccatattttaaaaattatttacctcaggctgtcttcttctcaaatgtaagcatttgagaagaatacatatgacaggttttaattcatcatgttttcattatcagagtgtctttaatttccattataattttcatcattgaaagtgtgttttctatacagtatttggaagtggtatgtgtttttgtcttttaatcctttttattatagacacctgacttaattgcattgtggttagataatgtaatttttacaatgcatagtttttgaaaattgttaacacttgcttagtgcataatcaagtttatgcatcttccacatgcattttggaagaaagtggactaattattggatggggaattttacatttattcagtagataaagctctactgttaacattattcaaatcttgaccttgctgagtttttgtgctgcttgacttaccacttgagaaagggtgttgaaattgcccaacatgatgacagatttatcttaatttctcttgtacttatatcaagtttttgctttatttttaggctgttatatactattaggtgcatacatatttaaatttgttatatcttctctgcaaattgaatcccttatcttgatttatgaccctctgcaaaaaagatgtttttatctcaaagtcagttttgcctgatattaatatagccatttaattatatttgctttatatatctggtttccctgcctttgttttcagttttctctctcatgctttaggtatatacagttgacccttgaaccagacaagtttgaactgtgtgggtccactcatacacttatatgtggatttttgaaaataaatatattggaaatattttttgagatgtggcaatttgaaaaaacttgtagataaactatatagcctagaaatagtgacaaaattaagaaaaatttaggtatgtcatgaacacataaaatatatgtagctactagactaacatttactatcttaaaacatacacatctattatgaagtttaatttatcaaaatatatgcacacaaacacagactttacatgataccgcttgtagttgagagaaatgtaagcaaacataaagatgcagtaatagctacataagatttactatagtacatactgtactactgtaataattttgtagttacctcctgttgctttatggtaagctaaggtgttttgagtgtccacttaaaatgctgtgtgatgcaaccatctctgcgacagttcagctctccagtaaattgtgaattgcagtgaaaggtgatctcgcagttcttgcatatttttcatcatgtttagtgcaatactgtaaaccttgaataacaccaggggacccataatgtgctactggtgatgctggacatgctcccaagaagtagagaaaagtcatgacattacaagaaaccattgctcagtatgtaccaaagatacatgttacaactgtggctgcagttattcaccatttctggataaatgaatttaacataagaaccatggttaaaaaaaaaagaaaaagaaaaaaatgtatgaagctgccactgcagctacgttggcaacagtaagtagttaaatgtttgggaagtcaaaagttgtatgtgggttttcaactgttgttgggggattggttcccttagccctcatattgtttaagggtcaactatatattatatcttaaatattataaagctggattttgttttttaatctcatctgagtttgccttttattggagagtttagaccagtcacatttattacaattactggtatagttggattactttctgtcatcattgctgatttgcatttgcctgcttttctgttttttctcatgttttttaaggttcattaattactgttattgttgacaaccctaaccctggttctacaattttaaactagtttactgtttaaaccttccctttctgttctttttttttttttttgagacggagtctcactttgttgccaggctggagtgtagtagcgcgatctcggctcaccgcaacctccgactccttggttcaagtgattctcctgcctcagcctcccaagtagctgggattatagacgcccaccactacgcccagctaatttttgtatttttaatagagacgaggtttcaccatattggccaggatggtctcaatctcttgatctctgatcccctgaccttgttatctgcccgcttcagcctcccaaagtgttgggattataggtgtgagccaccatgcttggcctcatttctgttcttttagtcgttaccagtgaaattttaccacacaaatttaatttagtattctaaaagttaatatcctgaccccactctcaaacagtaaaaggacttttgaatacctatgaagagcttcagtctttatcctcctcatttacttgtttccagtgtttcaatttgatcttttttaaaatgcacaagttgggccgggtgcggtggctcatgcctgtaatcccagcactttgggaggctgaggcgggtggatcacctgaggtcaggagttcgagaccagcctgaccatatggtgaaaccctgtctctactaaaaatagaaaaattagccaggcatggtggcacacacctgtagtcccagctactcaggaggctgaggcagaagaatcgcttgaacccaggaggcagaggttgcagtgggctgagattgcgccgctgcactccagcctgagcgacaaagcgacactccttatcaaaaaaaataagtaaaataaaatacacaagttggacaacatttttgtaattttttccaggcaatgttttttgaggtttacctcctgtttatcattttacttattcttaacatctctgagtgttatttggggatcattattttccaatattttgaagtatttttgaagtatttttttggaagtttcactgaaacatgtctgttggcaatatattttccaagagtctattcacctgtgagtgttttctttctttgtgttcttgtgcagtagttttgctggatacccaaatctaggttgttagttatttgctctccacaccttatatatattattatcccactgtcttctgctttccattgttgagtggacttctatcattctaattgtctgtcgttcctttgtaggtgatctgtcctttctctctggctgctttcaagatcttctctttgtgtttgatgttctgcagtttcactacgatgtgtctaggcgtggatttccttttatttttcctgtttggtataatgtatggaagcatcccatatatttgaaataaaatgcattatgaaatacatgctcaccatagaaaatctggaaaaagaaagcatatcaatgtaatatctcctgatagatgagaaaataatcaaatagtataaaaaagattaaaaataaaaagcaacattccttacttcattcttctctatactagtcccactccgcagaatcccccacttttaaatgcttctgtttctttctccgtgttgtaataatatgctttatactgtttcttcattgaccaactagatagtacctgttgatttcttgctgtatgtcaggttctagcccatttatacttttcccttgcttccaagctcatacagcaaaatcaatttttaattcatttattggttactttagtaattttaagtagtaacttaaatatttcttgtctggttatatttcagtatattttgacttctgaaagatatgtatccttcaattcctttttttttttggaggtagagtctcacttttgtcacccaggctggagtgcagtggcgtaatcctggctcactgcaacctctgcctcctgggtttaagtgattctcctgcctcagcctccttagtagcttgggactacaggcacaccctgccacacctggaatttttaataaaatttttagtagagacagggtctcaccatcatgcccaggctggtctcaaactcctgagctcaggcagtctgcccaccttgtcctcccaaagtgctgggattacaggcataagccaccatgccaggcctctctttcaagtcttatattttctttcttgccgccacctacattctgtcctgcctccaccttctaaattgtcacctgttcttttatattgtcaaagctgatcaaatttacattttgttccctactttagttaagacttagtcgattgactctaagttgagaaacagtaagcatttacactgttaagactatttagtctgggcatggttggtggctcacacctgtaatcccagcactttaggaggctgaggtgggagatttgcttgagcctaggaatttgaggccagcgtgggcaacatagcgagaccctcatctatatatatattttaatgttttttaattagctgggtgtgatgatgtgcacctatagtcatggctactctggagaattgcttgagcccaggagttcgaggttacagtgagctgtgattgtgccagcctgggtgacagaccaagaccctgtctctaaaaataaaaaaaaaattttaaagactatataaatattacaaggccaaatttacattctgtttcttgtacagttttgtgtgggaactctctagagtttttttaatttttcccccttttttgtttcccttaggttcttcttttttcccttctttcattgcctacctgtactgtagcctaaaagtcttatcactctgtgctttgaaatctttgggtttcccactttttcttaggtaccttcctcctggagcctctctcctccttttctgacctcactgcttgctctaggcctgctcaaggccatcatcccgaggcgccctcctcccctgagtcggctctgcaattcctgaattccattttgtcttctcagtgcatttctccgttttgtaatcacgtcacaaagaaactccttaagaaagtatagaaggtaaattttctgagttcttggaaatctgaagctatccttgtacttgtttgatactttgactaggtacagaattataggttgaagtcattttcttcagaactttgaaggcatagtttcattatcttgaggcttcagtgttgatgctgagaacttggttgcccatcttattccattgtgtaatacctgggatttttttctccgggaacttttttttttctatgttcctggtgtctgaaatttcactgtggtatgtctagatgctagttaggtacattaggtacccttttaatttgaaaattcattctcttccgtgtgggaaatactcttgcattatttgttttaaaatttgctgtccttgttttcattgttctctggtggaaattctgttagttggatgataagcccttactttaatctgtcagttgtatattttttctctcttgatttttgacttgatcttgttggtctactcttgaatacttgcttgacttgatctttagtctccttactgaacattttaaaaatgtaggcaagcatattttttaatttccacaaactttttcttgttctatttttcatagtatcttactttgtggatacagaatcatctcaactgtctgaagatcctaattaaagggattttttttttcttttcaaggaattcactcttgtcttctaattaatggagtcagagtcagattttatgctttttttcttgctctttcgattatggaatttttttcaaaaacatctgcagatagtggttcctagtttaaggaaaggtagtgcagaggcttacctagaattgtgctgtgggctgagcttttctgcaggcaggtttagctttcaatgaagcagacaaggagctgcaattggccttgcagttgtagaggaatttcttgggggagcaggttggtatgcttacactcctactggttgtctattaaaaatattaaaattttgtcttttaaatgtctgtctctggcagtaccattcacaagccttcttctctgccttacatccttcttggtttttactcattgctgcaatctctcacagttggatggccctttgtttcatccaaattcaaggcttgatatatcatctctgcactgtgactctcacatttttatatctccagcctggaccttgccctgaattcctcatttctgtccaaccactttatatttcttcttggaggtgtaataaatcatttcaaacttgtccaaagctcaactatgaattttcctctcctgtctgttcttcctgtagtcttcctcattttagtttattggtgacttcacctttccagtttctgagacagaatcctgttgccattctttttttctctccttctcctttccttcctcttccctctctacctctgtctccctccttcccttgttccacctgtcagcctctacctccagatttatagaattcactaccgtttatcacttctgcctctaccacccatcaaagtcactgtctggccgggtgcggtggctcatgcctgtaatcccagcactttgggaggccgaggcgggtggatcatatgaggctaggagttcgagacctgcctggccggcatagtgaaaccccgtctctactaaaaatacaaatattagctgggcatgatggcacatgcctgtagtcccagctactcaggaggctgaggtacgagaattggttgaacctgggaggcggaggttacggtgagccgagatcatgccactgcactctagccttggtgacacagtgacactctgtctccaaaaaaaaaaaggcaaaaaaaagtcaccgtctgtgatttgccttggttacttgattattggaatagtgtgttcttacaaggtgtgcctgctttcaaacttgccttccttcagtccatcccacacagcagcagcagtgatcctttacactgtaaattagatcatgctactttgcagcttagaaccccccaggggctccctgtcacactgtaagtcacagtgttctgccttctcatcacccacctgcctccctctgctctggctccccgtgcttgctgctgctcctgcacactggcctgcttgtccttcaggacgttggaagagctgcgcgtctcagatgcttttgccctctcctgagaatgtttactttggatgttctcatatctcatccatgtgtcatctttgaggccttctctggccccatccccacactccctcttttctgaagctttatttttccccataacgtttgtcaccatcaaatacatattttatgtttttgtagtttaggtatttttatccgaacgtaggtctttatgttttaacgtgaattgttttcttttagcatgtatttttttgggggtcttgagagctacctccttccccgtctcaacagagtctgtcctttttgagcagggatttatgtgtttgttctgtatggctgttactgagtgcccagagcagtgtctggcatatagtagcaggagctcagtcagtgtttgttgtctgagtaaatgtcactcctgccttgcatctaacctgcagttttcacaggggctcatttgtggttttgcctgctgtgccttacagccagtatttgtccatatattttctattacccagagattgttgacatctcatctgctgcaccttgtaacccccatctctaaaccagtgatctccatcatatttttgacctgaaaatttttgtacagtagccatttttaagtatgtataccaatatatgtattttacttacgtacacatgctgtattgatatgaatattagaaaacataagaatagaaatctgccgggcttggtggctcacgcctgtaatcccagcaatttgagaggctgagacgggcagatcattaggtcaggagttcgagaccagcctggccaacatggtgaaccgccgtctctactaaaaatacaaaaattagccgggtgtggtgatgggtgcctgtaatcccagctacttgggaagctgaggcaggagaattgcttgaacctgggaggcggaggttgcagtgagccaagattgcgccactccactgtagcctgagcgacagggtgagactccatctcggaaaataaaataaaaaaagaacagaaacccaaagatcatagggtagagatgtagatattaagttctttaattcacttttatggactcttcagaaggagagattataattgtatatgcttgatacattgtgttggactggaagcactgtgaaagattcttagtcaaggggagattttacattcaaagaaaatggaaaatccccctgctttgctcggagggaagaactgcacttaaaagtttgatgtgtattggtgtcgtcttctaggcatttcttatatctgtgaacatgtgcaccctttgtatataaagtggaattacatgtttacttacgcacacacacacatgtacatataaagcaggaattatactacccagagttctctgtgacatttttgttccacttaatgtatcatgggagagtccttgagtgtggacctaggagccagactaccgaaggtgcagaccctgcagtttactagttgatttaacctttctgtaccctagtttcctaatctataaatgaagaataacggtagcatttacttcagagttcttggtaggagtaaatgttaaaatacataagctttctctgctgatgaatatttacactggagtcttaggaagggtccttgcttattttctattctaaagttgggctggacatagtgggccatatgggtgccatcagatgggctcttgtttctctgtgacccgttctgttagacctctttcctgcttttttccttgaggttgtttatctgtcctctagtgaaccagctggtttgcaggtggtgcttttctgagagtgtcttgctgttaacagttactatggatgtcatatgccagctggttctgttaaaaaaaagtctgtgaatccaaagccttgaattttgaacattattttctgtctggaattttgaagaactgattcataaagtggagaaatgaataaagatttttattttacaaattccagcacttagcattttctttattctgttactgtgacatctatttgggaaaccaaagactaccattctttataaggattcctttttttttttttttttttttttttttgagacagattctcactctgtcacccaggctgcagtgcagtggcgcagtctcactcaccgcagcctctgccttcccaggttcaggtgattctcatgcctcagcctcccgagtagctggaattacaggcatatgccaccacgcctggctaatttttgtatttttagtggagacagggttttgccatgttggccaggctggtcttgaactcctgacctcaagtgatccacctgccttggcctcccaaagtgctggaatgacaggtgtgggcctctgtgccaggccaggattcttcttttaagagactatagtgagcagcatctaccaacttgcatccttgtatgttgcatatcttatttgtttgcttggggagtaaaccaaagtaaaaacgtcctttgtcaaattaaggaccttacaagattttctgtgttaatggattggaagtctttactattctttttttttttttttgagatggagtctccctctgtcgcctaggctggagtgcagtggcacgatctctgcttattcagtctctgcctcccgggttcaagcgattctcctgcctcagcctcctgagtagctgggataacaggcgtgcgccaccacacctggctgatttttgtatttttagcagagacgggatttcgccacattggtcaggctggtctcgaactcctgacctcataatccacccaccttggcctcccaaaatgctgggattacaggcatgagtcaccacgcccagcctagatgtctttactattcttaagatggcagtagtccccaagttgatctatggattcaactcaatccctgtttaaaccccaaattgcttttttttgtagaaatcggcaggctgatcctaaaattcatatggaaataaaaagggactgagaatagccaaaactattgaaaaagagtaacgttggcaaggttatgttgcttgatttcaaaacttactacaaagctagagtaatgaagactgtgtggtactggcataaggatgaccatacagacccgtggaccggaattgagaatccagaaataaatgcatactttcacaacccatcaatttttggcagcggtgttaagacagtttattggcaaaagaataggtttttccacaggtgatgctgggacaactgaatatccacatgaaaagaatgaagttggaaccttatcttatgtcataaacaaaaataactcaaaatggatcaaaaacctaaacttcaaaactcttagggaaaaaaatagatatgtcttggattccagaatgatttcttaaatatgacaccaaaagcacaagcaaccaaaggaaaaaagataactcggacttcatcaaaatttagtatttttgtgtttcaaaagatactatcaaaaaaaaaaaagacaacaaaatgggagagaatatttaagaaacacctgtctaataatggtctagtattaagccaaggctgagttcttatttccccatccttaagtttacacgatactatattagtgaagttgaattctgtcattaccacatgtatcttgaaagaagtttgtgtggatcacgggtccagttactttctccgccctttccctccagaggatttgtcactctcaataatgttatatactaatttcaaggggaaatacaactcaaaacaaatcagaaatctgaagcttaaaaatgttatggtttagatgatgaaaagggaaaagtacatttaattcatatcatatttagatgtaaagcacttaatgttatattgcttaacctataaagtagcgcttcagtgctctcatcatatgaagtaaataatagaaaattctttgtgtgacacatgtctgttttcagccaatcagaaaccaggattattttgtatgtaataatagggtttactggaagaggagctatacagatggtacttagaggatgtagggccctacgtattagggcttcttagttgtagcgaagagcaattggtctggtacgtttagctttttcacatttagttttgaattctgactctagaaatgtacaaccccatcttttgaattacaggttttaagatgttatttgctcttaatacgtcttaaggtaacagccttgatcactgcttttactttcgatgaaataacttaatgagctgtgaagaaaaaattatcagattttaagggagagaattttatgaaaatgtctttgaggttcctgtcacctttatgagaatgtcttcaaagtttccatcaccacctctaccaatttttcttccaccggagccagtggacttaggttccataacaagctcctcttgttcactgaatgagctagacaatatttcccaccttttaaggaaaatatcagctgatatcaatgaaattaaaggaatgaaagcagctattttgacagtggaagcaaatctttttgatctaaatgttagagtgtccaagaatgaagcaaaaatttcatctttggaggttaaaatgaatgaatattcaacaacatatgaatgcaacagacagtttgaagatcaagaagaagatactgaatcacagtcaagaactactgatgtaaaaataatcggcttccttagaaacgttgagaaaggtaaactcttaatatatgatatgttctaggtacccatcctttgatctgtatctttccacgtatgttgactgtagctctgatgtggagggagcaagttacagagaacttgaatttttcatggacctttaatgacaaatttggattctgcttgatttagcttagcaatctagaattgatcagaattccatcctctttaatggagctctctaaaacgatgttttgaaaagacagatgaacctagagcaatgaagcaaaacttgaaatgtggaagtgtggtctttcatgtgtcttgtgaaattattttaaaatgtctcattctttcatcatgtactgttgatgtgaaggagacctgttgcagtatttggatggaaagagcattcttcctgtaacttttcacctcagttttccaagcttcccacaggaatgcaacttgacctaagtgtcatcttcgttacagttcctcagaatgtgtgtttttttatggtaataattctggaaggaattgacttttttgggacgcaccagtaaaatttcatataacttatgttttaaaggaaactaactgatacaatttcaaatcgagtataggttttaaaatttaaaaacaccttttaatgaaatgtggtgcttggtgggagatggcccacttaacatctttgcactgagtaagcaaagcctgtccttgtgaagccacctgtaatggatatacccaaaatcagcatgtgggcatcttagtaagatttcagtatttgcaaccctatcagttacatccctttgtacactgtagtgcagtaccttataatgagcaagtgagtgcctgatgtctgctaagcgctgtgggggctacagaaaagtgtgacattctcccatcctcaaggagcttaacatcaaatcgaggatggaaaaaaatcagttctttgtccctattttgtgcagtcagactgctgggcatattattgttaggaatagtgaacctaataggaattaatgttaggagcctattttagaagaaataagtagttgaacatcttttcttgtggaagaggcaaagaattattatcatgctttgctaacatagggtgtggattgtagagctgagtgtcttattgttttctttgcatgcatcgaagcccagagtttgtcttttaggaactcttgtttagatgatgagagtgttttgttttgctatttcgattatcttcaaaggtcatgagtgagtcgtgatggtaagagctcaggtgatggagggaggtgcttgccatgcttattgtgcagttggctgtgatgcgagctgctgggccacaaggtgccttttcctggattttccacccgtttgccacctttactttccccgcagaattcaaattcaggaaaactgatgtcctcatagagggagaaccaggagtgttttaaattggcatttgtggtttaaccctgagtacagccttttttgtcttacaggatatgtctttggtctataaatactattaaattgaattgttgaagctttaagttacttttaagacttcaagttaagaacccagaaggattgatttttgggaaccacatgctggtattgtctgtgttgtaagcttagtgaagttttaaaatttatattctaggaactcaacagaggcaattattatcccgactgcaaatcgacccagtaatggcagaaactctgcagatgagtcaaggttggtaatgtttcaagttgtactgtaatccagccatttcagttgccatttccatttcttacaccccatttaacgtatctcggatctcttagatcctgccctaagatgttatatttagatctgtgaaaatattttagggccaggagataagatctgcatttctttcatgttatatagtgttataattttttgcctcattggaaaactttgttcctttcacaccattccaagtgtgtccctagcactgtcggctgtcactctcctgctgtcaggagtgacctgcgtttctgatttaccctcccactctacccagcttttgtcattgccatgagtggcttttgtatcctgtttttcacctggttagccttatcctcttgtacttcattttggagtcttatcaccagggccacacctggaacttgttgttctagtgttctagagccactctagtttgcctgtctcctttcctctccccacagacacacatgccaggggctactccaggactggagctgacgccttcatttttattatctctgtcctcagtgcccagcccctgccagatgcatgttcaatgtcttaaaaatgactgcaggataaacacaggcaaccatgagagacccggaatcatctcagtccttctgtttcccctaagtctgtcttttgtgggaagctctggtccctagacccctctcagtcaggactccacagtcagtcactctgttccccgaccctcccccagctttccagctcagaaagtgtgcttttcctccctaagggtcagcctccaccagaggccagatcccactgggttggtgagccactggcatgtcacccactcctccaacttcattctctgcctcctgtcttctctctgtagaggtgttcagacattctctgcccgtgattttgctctctcatctcccagcagtccgtcctgcttcctccacaggagtatttgaaaaggttgacagccgagatctgtgtgtgggatccacttcatcagctcttgtgcatgttttctcttctgcctccttcagcttttcattgtacccatggtgcacgcagtttgaaatagcaagtagttctgtgaggcttatgaatgactgcagtccttagctcctatcacattttttattctaagatccctttgtttctgcatattctattaattttctaaaaacatactgattttgtgtacacaatactctttgttatttctctgtggtctgaaaggtggttttgacatttttcccctccctgcttcgtcttgttttctctaagtggtctgttttggctgtcttttatgctggaggttcccctctgatgtctggggatcctaggtggtcttacatttaagagtggagcactcagaaggtcactggtattctgggttcatgagttggggcatggggcactttgactttctgtttgaaactagaccctgtggtggaaagtgatttgtcctgcctgtctggtttgtgggcaccctgatgtcactgccttcaagactttcctctcaggctggtcagcttctccaaaacaaagtttttcaagtaatagcctggtagtcagagttctgcgagcttaagtggggaaagaaggctgggggaggcacctcaccattaattattatgtaatgtttatttaaccctcccccaaccattgtcagtccagtacttctttcatcatggctggtgtctcttggtccagggactctgttcttatcctctgaagagtctaaagctccactttctccaagggagaatgcatgcagtgggtaaagatttatcaggaaatctaattgcctttaaaaatttttaacagtgtaccttcaggtgattttgtcgtagcatctttctggcagagaccctaatgcttcatccataggcctctccgaagattatctacaggaaagcacatcaccagtcatcccaggtgtcttcagtgtagaggtcgggattggtgtggcaagcatcaaaaccaagaaaacagtggccaggtgcagtggctcacgcccataatcccagcacttggggaagccaaggcaggcagatcacttcaggtcaggagttccagaccagcctggccaacatggcgaaacccaatctctactaaaaaatacaaaaattagccaggcgtggtggtgcacatctgtaatcccagctactaaggaggctgaggcaggagccttgcttgaacccaggaggcggaggttgcagtgagctgagctcgcaccactgcactccagcctgggtgacagagcaagactgtctcaaacaaagaaaacagatacatggaattagagttgaagaagaactaactgcttcttggacacatctaatacacctcttttttgcctgccatttcttccatttcttcctaaggtccttttactgccagttcctgagcctttggagaatcttgtggtctgaattggattgcttcattattgccttagaattcagcttttacagatcccctgagttcttaatcatctgttttccactttgaaaatttctttttacacttattttctttgtgagtttatgctttcaaaacaaaaacaaaacccttattgacatttctgtgggctttcaggagggaacaaaaagtaaatgcatggggtcagcctgtggtctctactcagaagatgttacttactcccccgtctgtctggtctccatgtgacctgggctgctaacgttccgcttgcagagaggtgtgcgggagggaccggtgcacgctttcctcaaccctggagcatgttacacttgggttcccatactttctccaagctttgacctttcggcttccagttcactctgtctttattcttctcattccctttcattctcatgtgtcagcgcatctcctccattcctcctcaaaaggttagctttgctctctcccaccttcagcattattttcatctcttctgtgttcacccaacctatgaactggtagaactccttcgtctcagaaagtgcagagtggtgggaaggagtgaagcagcccctgggccactgttgggacccacctttgacagttgtgagacctcggtgaatcatttaataacttggagctgcaaacagtcatctgtaacatgggaggaaaccgactttgtaggctttgagtgaggattcagtgagagacggccaccctgaatatgttaaacacttctgtcaccttcggttttgactcagcatcttatttctgtccccccacctacaggtcaaatctgaattttctacttcctcttaaacatgggagagtcccacaaagactttaaatctaacatggaaatgtatctttgccccttttaactttgctctttttcttttgctaagtttctcatcccagctttctcttccgcctgtctccctttaccatctgtactgcccttgctggggaaggcgggcacgccccttcccaggatggagcatgtcttctcttcctgtcaggtgtgtgagaccaggacagacagcagagaatcttttcattcagagcctcaccctctgtcccgggcaacagcaggtcgagaactctggttcttccttaacactgtttttctaaaaaccagtttgatcaggccacttccttccttaggaacctctcttgatttcttttctcttttttttttttttggtttgagatggagtctccctctgtcactcgtgctggagtgcagtggcacaatcctgctcattgcagccttgacctcctgggcccaagcacttctcccacctcagcctcccaagtagctgggactgcgggcatgtgctcccacgcctggctaattttatttatttatttattttctggttgatgggaggtctcactatgttgcctaggccggtctcaaactcctgggcttatggaatccttgtgccttggcctcccagaatgttgggattacagacatgaaccgccacaccaggccacttgatttcttactaattatagaccagaatcgagagtcactgagacatagaagaacctttattatatgtgtcagccttccttggtatgtactgctgagcccaccacacacacccttccagccattccacattctaacctttctcagatgccttcggccttgtgaaagcccctttccttctacgtgcgttttcctctgcctgaagtgctgtgttcgtttctccgagtctctctccttgtttattcctgcttgttcctttactgctgacttcagatgttcctccttgctaagcttttcgttggttcttggctggagtgggctgttctgtattctcagcaccttgttcacatcccttttgggtcatgctattctgaaattgtatatgtgtctgtttttctttttttctttgtgtatctagctcagttctcttagttgttcagtaaatactcagtgaatgaacataaatgaataccctgtaaattttggtctctaagctttaaaagaagtgtattaacttcagtccgttgatggcgtattgataggtcagccattctgggttgtaggtcttggcatattttataaaatagtagatgatgtgagcttatggttatttgcattaaaggccagtgtttttcttgatacatatgtttaagtgtccattcacctttcagttaccttttaaagtagtcctcggtttataaccaactggaaattataccacttgaattctttttatcaggacatgattctaagtggtactgtgcgaagtgaacaaaccagattttggaaaagtggttcagcagtctgtgtattctaattatagggagcattaggactcaaattctccaggtttttagaaaagatttttgtactttaagggtatattgttaatatctgttgagatgcctcacctgagaacctttctctgctgtggttagggagtgttaatcagaatcacttgtgccgtgccctacgcgagaaggactccttgagttctttgaaaacatgtttggaatagaattatagccctgttttcctgagtggaaccagttgtgattttcctttgaaataatttgaatatataaaagattgacattcttctcacatatataatgttgggaatgtaaggtatattcaaaagtaaacatttgtggccaatttttttggctcagattactatgacatggaatccatggtccatgcagacacaagatcatttattctgaagaagccaaagctgtctgaggaagtagtagtggcaccaaaccaagagtcggggatgaagactgcagattcccttcgggtactttcaggacaccttatgcagacacggtagatggtttctttttcttgtgtagttaatttgtgtgattagatagtaaaggttaaccattcgtttgcagcttccctcctccccgccctaaccgctagcgtagagtgctttcattgattcagtagctagcccatgaatagttagccaaattcagttttcaagaattccagttcatctttcttgttcagaaatccattaacctacaaattacaactcagtgtatgatttaactctattaaagattcttttctttatgcaaattcaggaaatgcaagtttaaaagccagctgaccataatcaggtcagctctaaagagagttggcagatcaggtttgggtgatttttcccttagaaaattgactgtttctataaaagaagaaacatacagataattagcataaatgctgctggcccttgtgttctgagcattgatgctaattttttggtttgtttccatgttgaccctatgaagatcgaatgggtgatggggtcaggcttgaggggagattgtccttagtaagtacaggctggagggtcactggtgatgccactgtgactgttcatggccatcgtgtgttagcagagaacccaccagtgctgcacctggtagccctacctagtctttttttattgaaccaaacgcaaagccaagggagtgatagttctgctgaagagcactttagggggctcagcgttttgtgtttgtttccctaattctatggtattttttatctgtctggcagagatcttgtacaaccagataaacctgcaagtcccaagtttatagtgacgctggatggtgtccccagccccccaggatacatgtcagatcaagaggaggacatgtgctttgaaggaatgaaacccgtaaaccaaactgcagcctcaaacaagggactcagaggtctcctccacccacagcagttgcacttgctgagcaggcagcttgaggacccaaatggtagcttttctaacggtgtgttgagagctcagattttcagggtgctgtcattgtgaagggaatctttgacttgtttctctaccttgaatgaatattggttaaaggccttgcttttatttatattcagtaatggccttttttcttctttcagacaaacccaccaagtacatttcagactctttttcctgtgtctttttcataggtgggctgttactccagtttgaaaacggagttcagccatggaacctgagagacctcttccgcttatgctggctaaaggatgaaccaccattcttgttgccttctttacctttgtattttcttcagaaactgtactgccactttgcccttttatcagcaatagtctcttgcaattaacttgagagaaaaatttagatttgatgctatttctacctcagtgaaatttctttgaaaggagtttctcacctaatctatcaagatcttggaactgtttaaattaatgttgaagagtaatatttagcagaactcagatgaactcatttcagatagcaccatagtttttggcaggtgacagtttcttatcaccgtttctttcactgggtatcagtggtagctgcaacgccactgatcatttccattcatgatagagaatggtaattatgttccttatatcttctaaaatatttagaagcacctcttcattggcaggagggataattactcaatcttaaaagcgtacagattcaaaggaaaaacagtaatggattttgaaacatttccttgagtaatcctcttcttggaagagatatgaaaatgtattgaatacctttctcgatcattaaaaatagaatagacttcagagggaaatcatatgttagtggagcaataacacttagctttattttaattggttgcgtttcctactgtgaatcaatgacgtagtgtcgtggttttgattagtggagggagttgaaaatctgaccctatcaacaggaagaaaaacttaaaaaatagtaaaagctgcagtaggcagtcccgatttattgactctgtatgttttgtctaaagagaagactccagtgttttcactactcttgattttcaatttggtaccttaattttttggtctattaggatctggtttcatttaaatgtaggtgtccatatgaggctttatggggtatacatgtagcagcagtgacaccataaataatatgttagtaaaaattcttgccagtgctgtggccattgtgctgacagccatgatgagtggtgagcctcctttcccattgctttgactggggactcagtgtttccctgctgctcaaggatgaagctttgtaagattagcataggggtgtggctggagagactcctgcagaacagttctcaggagtctctagtctctgcaccacttcccctgtgagcagggagtttgaaactgcaattgcttctggttggttttatgttgggttgtttcaaggatgctaccaacaacaacatctgttttaacctgctgtcttttcactcactgtcatatggcagcacagattttatagcttgctttctttgttttttttttttttgagatagagtctctctgtcccccaggctggagtgcaatggagccatctcagctcactgcaacttctgccttccaggttgaaagccattcttctgcctcagtctcccaagtagctgggattacaggcatgcaccatcacacctggctaattttgtagtttaagtagagacggggttttaccatgttggtcaggctaatctccaactcctgacctcaagtgatccaccaacctcggcctcccaaagttctgggattacaggtgtgagccaccgtgcctggcctatagctttcaataaaaggtgaatttgcctcttaaaatttgaacagaaagttttaatagtttacaaagtcggtgtcagccagtgaagactaggggcatgaccttcgtatgacttaatgtttttaaaagaaagataaagtttctttgtaaggtattattgtaataatcacatttctttgtaaagtattatattgttcctgagtatctagctactttgctttccagctaggcttctcttgggtattctcttaatcttttatttgtactgggttcttgtgtatatattatagtctgctgtgtgtaatttattataggaaaagggtaagacacatttactttgcggggatgacacaaaaaacctgtaaaaattagagaaacttccagtcatctcacattttctttggaaccgattattcttgtatcttagaactaaaatgacttatactgttttgtttttagaaagggtatccctcctgttgcccaggctggagtgcattggcacagtcatggctcactgcagcctccacctcccaggctcaagtgattctcccacctcagcctcctgagtagttggttactacaggtgcacaccaccatgcctggctaattttttgtattttttgtagagatggggtttcaccatgttgcccaggctggtctgaaactcctgagctcaagtgatctgcccgcctcggcctcccaaagtgctggggttacaggcatgagccaccacatcctatttaaagcttaaataggacttttactatttttaaagtagcatagaaaactgtttgtatcaggcatagtcataattgctctttgatgctgctcctatctgggctgcatgactacatttgtgtgccttgttctcctgtagtgaggacagaatgtgggtcactggaacagtaagtactcatagaactagctgctgctgctattacgactggttgcctgttttgcattttttccgtttaatcatcagactctaaggaagacattattttctctttgtatagatgaggaaacagaattccaaaaagttagctaacatttgcacagagtgtctggctgagcaactaagtggcagagtcagattttaactgacctctggcaagaggactagaggaatacagttgaagtgatacttgctttcatgaacatgaatgtgaaccataatacataatacccatgatgctattttgtggggagtttaaggtgtctcagtccagaaattagcagctgattattgcctgtagctgtaattttacttattcagtgttatttaataaattgccagcattacaatttcgatgaaggcagatttttggcttactgaaacaggataaaaatctggcaacaggggtcccactttgccctgtcatagtaatcgaagctgtgattggatgtggcacagggagtggagtggatgggtgtgcacttgctttccaggctgctgctccccgtctgtcccttattgcatttatcatcttcagcccagtcagtcttgctgttaggggaactgcccagtctctgtaagtgatggcatttgtgaccccattgtaggtaaaaatgttttcccctttttagacattgctggctgagcgcggtggctcatgcctataatcccagcactttgggaggccgaggtgggtggatcgcttaagtcctggagttcaagaccagcctgggcaacgtggggaaaccctgtagccaggcgtggtggcacgtgctacttggtaggggctgaggtgggagtatcacttgagcctgggaggcagaggttgcagtgagccgagattacaccactggcacaccactgtactccatcctgggtgacagagcaggaccctgtcgtaaaaaaaaaaaaaaaaaaaaaaagtaaaagacattgctgagtttcgcacctggacttacagctcagcaggtgggaatccttttgtatttgggccactcatcatcttgctggcgtgtgaggattcacatctccttatcaccttacctgttttcagtttttatttaattttattagttccccacttgacgtccttctctatttttaattcagctatgaattagtattgagaattagaatttttggtgaaaaatttggccgtagttgcagagtcactgtcctctttccttttcacagtgagaactgttgtcttcttcctggcaaccttttataggattctatggccagtgttaatcccataatttgagctcacttattttatatgactgtacatttaacagaagattctaagacaggtttgagggaaatatgttaaaggtgctgtgtactgaattgatcataatgaatgaaatacttttatttcctttccctttgtagctgagatgagtgaactgagtgtggcacagaaaccagaaaaacttttggagcgctgcaagtactggcctgcttgtaaaaatggggatgagtgtgcctaccatcaccccatctcaccctgcaagtgagtaccatccccccatctcaccctgcaagtgagtaccatccccccatctcaccctgcaagtaccatcccccatctcacctggcaagtaccatcccatctcacccagcaagtaccatcccccacatctcaaccctcaagtgagtaccatcccatctcaccctgcaagtaccatcccatttcaccctgcaagtaccatcccccatctcaccctgcaagtaccatctccccatctcaccctgtaactaccatcccatctcaccctgcaagtgagtaccatccctgcatttcaccctgcaagtaccatctcatctcaccctgcaagtaccaccccctcatctcaccctgcaagtatcatcccccatctagccctgtaagtgcgagtaccatcccccatcttaccctgcaagtaccatcacccacttcaccctgcaagtaccatcccccacctcagcctgcaagtaccatcccccacctcagcctgcaagtaccatcccctatctcaccctgcaagtaccatccccatctcaccctgcaagtatcatcccccacctcaccctgcaagtaccatcccccatctcaccctgcaattgagtaccatcccccatctcaccctgcaagtaccatcccccatctcaccctgcaagtgagtaccatcccccatctcaccttgcaagtaccatcccccatctcaccctgcaagtaccatcccccatctcaccctgcaagtatcatctcaccctgcaagtgagtaccatccccccatctcatcctgcaagtaccatcccccatctcaccctgcaagtaccatcccccatctcaccctgcaagtaccatcccccatcttaccctgcaagtgaataccatccccatctcaccctgcaagtgaataccatccccatctcaccctgcaagtgaataccatcccccatctcaccctgcaagtgaataccatccccatctcatcctgcaagtgaataccatccccatctcaccctgcaagtcatagccagctgattttggctttcagtttagtgtctgtatcttacaccttattttgtttttgtttttctgtggacaagtttttagttttataactaaatggagtgacaattaccatggccctctccagagtagcgtatttcttgttcatgtatgtttgttgagaggcaagggtgggggggctttgtttgtgcctcggacctgtgagatactgaaatacctggggttccttaagaattctgtacgtttaagcagatgggtatatggtaactgccccagtttgtatgcattttggccacacgcagtatacacagattttgaggagttgagggaaaagttagttatgggtaatgaaaacattttggacttgggttaaatttttccttacaagctggctggctcaatgtaatgagctttatgagatggctttttggggcttcttttttttgccgggggtaggtcctatggatggaatcttcatttttaattcttttaaggaaatgatgtgggaataatacagctgtacatataaggagagtatgggatgagtctttttgtatcacaaagccttgcatagaggatgtgtttattgtattaatgagttcactgcataaaatatataccttttttattaagtggtgtgatttttatcacaaaagcttgtctttcttggtggcttggcttgagttaaaagcctgtgtttgtgttatcccaagctttggaataaatgattgtgtcctattttgatatatggtcttattttaaaatattctttttgttgctgttttttttgcatttctcaaaacaagtagtgatggggagtgtaaagagcccttatacacagaactaataatgcattgagaagattgaatatgaaatatgctttttttttgttttgtagagccttccccaattgtaaatttgctgaaaaatgtttgtttgttcacccaaattgtaaatatgatgcaaagtgtactaaaccagattgtcccttcactcatgtgagtagaagaattccagtactgtctccaaaaccaggtgagtgagtgactgtgctactacatttgggtaaaaaatataaaatggcattttgtgactgtaaatggaattgaacaaacaaaagatggtttcagaaataattttggcaggatcagttaatccaaccagtctttaaagagcaagtgtgcctatctgtagtattccgaagtattttgactagtgaatatataaaccttaccattctaatttaaaaatggttttcactttcaaaaaaaacatcagtagactgcattaaaaatgggttttccaaacagattggagatcagtcctggtttttattttgttagcagttgcaccaccagcaccaccttccagtagtcagctctgccgttacttccctgcttgtaagaagatggaatgtcccttctatcatccaaaagtaagaacttctattttctcaaatcaatttagtgacaacatctcaatttcctcatttaacttcttttttgtcagagttactacattggtgcaaaagtaattgcgatttttgccagtaaaactattaagttgttcctcgtcactgaacctccatctggccccttaggccaagtggtctgaaactgttcaatgttagtatcccaagcactcagtggggggaagcatatctttgctagtcacattttccattattccctgcatttaagtatatggatgggttttagcgggggctggggggcagtttgaacctaatgtcagaactgagatgaagaaatccagtaggtactgcttaaaaccatccaaacttgtactgatgatggttgatgaatctccagatgtttagttggtcaaaatgaattatctccttcttgccccggtagcttgaggaccatatgaaggccttcacttgcccccatctgtaactgggcgtagatgagggtactcagtgaagagtgtaagggataattagaagtttttgtggtatgctaaactaccttttgaaattgtacttgctgtgattctttgactagaattttgtgtctcaaggttaagtccatttttcaaggcttcactagtattaaaatggtccttatagatggaatctcttactctgttaatggttagggtgggctggttattgtctcctaagttgtatgttggccaggtgaggtgggtcaggcctgctatcctagtactttgggaggtagaggcagaagtggaaggatcgtttgagcccgggagtttgaaaccagcctaggcaacatttaagagaccccatctcttaaaaaaaaaaaaaacaggcttggtagcacacgcctgtagtcccagctactcgggagactgaggcaagaggtcatgccacttcactccagcctgggtgacagagtgagaccctgtctcaaataataaaataatgtgtttacttatattagccttgtggatattgttgaagctctgttatctctattcagcattgtaggtttaacactcaatgtacaagaccggactgcacattctaccatcccaccattaatgtcccaccacgacatgccttgaaatggattcgacctcaaaccaggtaaacattcaaattcgtttttctcatgtcagttcaaattcttttttctaatttgcagtttctaaatttataagcacacaaaattggaaactagactgttactttgaatttttttctttgctgtttaattatagaaggctcctttggcaaaataatttactacatgggctaaattttacattatccagtggttacttttttaacctagattatcttgctctgttgcccaggttggagtgcagtcacactatcatagctcactgcagcctcaaacccctgggttcaatccatcctcccacctgtagctgagactacaagcgtgtgcctctatacctggctaattttttttattttaagtagagatggggtcttgaactcctgagctgaagcgatatccttccaccgtggccttccaaagtaccaggattacaggcatgagccaccacacccagccagattttaacttctcattatatactacgcaaacatatactaaggccagcaggagtatatatatgtgtactgtacttgaatttcacatccattttcttcgacattagcaactgggagatactgaaaggaagtttcaaaatattttagtgtggccagaaaatttaattacatatggtattatcttttatctacctgacataattgaattatttttaaaaatctgccatttatattgtaatcttatgaccaaatatttattgcttaaaactagtcaactttttaaactgagatatatggtatatatggatacaaagcagataattaaaacaatttttggttctgttcattcagcgaatagcacccagtcctgcctggcagaagatcatgcagtttggaagttttcatgtactgatgaaagatactctacagaacttgtcaaatctttgaaacttggaatatattgctttcataatatgaagttttattgcctatctatctgaagtgtctaatttttcaagtttgtaagtttattatgtggttttaacattgggtgtttttgttttgtttttactatgaaaagacagcttaaggaagagctaaattctgttaaaatatttggggcatgtttgtgcactgctgttgtgaggatcagcatatgaaattgacatcatggttagtcatggtactgcagcttagggggctacacggttgctgtgtgagtggagagatgcagtgaggcagttgtcattattctaaaaattgtactactttcacttttcccaaagattatataatgttcataatccaccatgaaaacagcattggccaaaggtactgaggctgcttaaaatattcaattctgctttttaatttttaagtgaatttagtttgaaaagcatgattatacaggcctctcaggctgagtgctactttggtaaagttcccagttttcctgccttctgtgacaggatgaatgaggtgggtatggacagtggaggcagctggaatggcaagtgcagaaaataggaacagttctatacagtgctctcatttactaataacataatgccttctaaataatttttttgggaaactacattatcacaaaattatacaaatttttttacaagtatttacatactgtatctgaaaacagactttaaagtcacaagattataaatgtacatatatattctcacattctgaaaaataacattctcagaatccacagaaaatatacttagttactactgaagataatttttgaaatgtaaaaattagatttaaatagtatattttaaatgacagaactataattacagagatcagatcagataggtaaactgcaagatagataggatgaaacttttggcctactgtattacttacagagtttttttgtgtgtggtttttaaaactgttaaggcaagaagtgtcaaatgctttagagttaaataacagatcactgatttcaaagacttggtgtatagtgttaaaaattaaagcttaaaaggtggttagaaaagtggattaatgcaaaaggggtaataaagactgcaacattctcaggaccaaattaaactgctaaaaaaaaaaaaaaagttcattgacttgcttagtcgtatactcaaatgatgataaacctacatgtgcaaaggctcacgtttaagattgtcaagccagcagtctactgttgtgttgccattgcttttccattgggagaagaaagaattaaccagtcattaaaccatttggtaagttgcactttgctgtgctgatcccacaggaaaggcttgaaacacgagaagcagcaaagacagagcacacaagtgcataaggctgttgtcttcggcttgggtgaaatgacagttcctcttcattctaaaggtttactccattgaatttaaggcatttgttcattccagtgttgagatgctttgcatctctgcagaagaaatttattttaaattgtttaaatatctggaaatacttttagctatcatttataaagatagttttgttctcagtttcactataaattatagaacaaatgggaaacaagggtttaatttagttcagccattttacaaggaaataataaaatactaaaatctgattgttttttgctatttaatagccactgcccagacacatatttaagagtttaatctttcagttgctatggcttatgaacaagctaaggttgaccataaaacatttgttggatgacgtggtttaaaatgatcaccacaaaaagggaccacaaaaaaaggaaggaaatgagcatggttggcgattggaagcaagggtaccagagggcacagtgtgctttggcatgcattttatacataaaatgaatggaacaaaaggtgccagaagtcccaggttacacaatcaggagcttagatactgcacacaaaaataattatctgggttaaaaaagtaaacatagggcagattctatatggcctatcatgtttcttcaccttcccctcgttgctggctgatacagcgaggtggtcagctgatgactacttagtcaatatgacctttagtcgtgaaactgacagcagcagtgattaaggctgacttaatcaggttggccactttgaaggacagaaatgcagtggaaacagttttattctatgtagtttacatgcttaaggttacagagtttctacctgcactgtaatggaaatataatttctctgtagccaaaagctggcaaacttgacccagagggaaaatttaaaactgcagcaggctcaaatgtagagtatttttctttttatgggcaggttgttcagggatttttttcctcctttaatttattgactgactgtaaatacatgagtagaaacttaatagtcatgtatttcaaaatttggcttaatttaggagaatccactgatgaacaagtaccaacttacgtttcaagcttcttagccccataatcagtccttcagccacagctatttagagctttaaaactaccaggttcaatcactggttatgctttctgtgatgtaatttagtcatttctatttttagtattaaccaagtattagacacagaaaataggtattaagaatcttcatatatcctgtcagaccaaatgggattccaggaacctaaagcgatctattatgctataaagataattaacacattaaaaactcatagggtcaatacagcatcttaaacctcacacttagaaaaatatatttttaaatagcagtctacataattttcaatcttcaggaaactacagataggctagacagcgaattcctgaatgatgagtagtgatctttggcagcatttaaagtgaaaagaaataaggatctaagaattcagccctaatccactaaaaaaaggaattctaactgacaagtttttacaaatggagttgggctcattcattttggaaataaacctatggagtggcacacatctaaacaaattttcccaatagaaaaaaggctataaaaattttattccaagagtgattaaattgtataatgttgtatatgtgaatttaacacttttgtttacatgttaaacaaatgtgtatatattagactacattaaatatgcaattctttcttccagttaaatactgttgctccctaaaacccttacattgtacaccattgggaatgattgttcatcatactacttttccattagtgaggctacagttatgttttaaatgtgcgattacagagatggcatctgaacataaactgatggctcgaaaatgaaaatggaaatgtagcagccatatactgctaactttggatctgttcctgaattcaaaactactaggagaaaagtgtcctttataaaaaaggaccttattaatgcctaaaaaacatcatattctctaggaaagcttgtgtctgtttccttagggaaaatgtttgccttttaaaaactgtgatcctttaggatgatcatgactttccctttccttatggaaatgcaagaataaaatatttcattaaacaatgaaccttgaaaataaaatataaacattaagaaaccattttgctaaaaagataatgaaaattatccaaattgggtttttgagttcttctgtaaagagtgctctaccctaaattttcccagcaggtctgccgaaatcacacacttcccaatacagggggacttggcctttaccatcaagtattcgatccttccttgaaatggcattatctggcagtgtatggattacggattatacccagtgcatatagcaaatattttgaacagatcagtctttcactattttgatgattctgggcatttctccctgttacagtcttgggttagcaccacttgaccatgcagggttgggttttggtttttcttctctgtaattctggtctcaaagttaatttctgtagtcatctcagcatctctcagtgaggtgtatgtacacatttccagacaaataagctgcaatcagagaagaaaattgcagggagttaattatgtttttagattttcataacagtttaatatttttcagttgtgctttcaggttacatgtgtaatatttttcctctttaactccttttattctgtatttgcataaatatgagattctgaagagccatctggttatactaccttctactaatgttgactagctgatttcataaaccaaagctgtaggagttgttgtattaagtctcttaactagtaacatagtctgctcttcatgggctgagaaagttactaacctgcagtcatcacctccagcactaacaacatgtcgatcaccactggtaaatcgaatatttgtcacatggggcgaatgacccaagaaccttttgtgttttgcctaaaaaacaatgacagacaagctcagggcatttggtgcacacagaagtcaaaggctcttattaggaactataatctctatgacaagagctgtggagagagtagggagttagcaccgcagccagtgattagaatgcttttcagcatgagtagtggatctgcaaaaccaggctgtgtgggcagtcagatgtctccaggtactctgaccatttttctctaaggaaaagcatttgaaatttgataactgattataggtttggtgaaaagctaattacagcttttgtaggatggttccaaagatggtattactcgagggagaggatttgtttctaatagcttttatttcaaagtaaatagatttagaaagtttggggaaaaatttagaaattaggacaaaacattttaaatatatggggaaaagtgctgatgataagacatcaaaattaggagtaaactgataatagtaaacaaaacacaaacttacaaatttttctggacatgggaagtcaaataacttaaccatgccaaagtcatctcctgtaacaagactgattcctgaatgagatacacaggcacagttgacatcagctttctcagcatgtctggaccagattcccaaaacctcatctcctagaatactagagggaaggaacaaaagaaaactcatcatggcaagtgcgggcaggttgactatattcaaaaagtttcttggcaattaatctctaagtaccctatcatgttacttaaaatacaggaagtaaattatggtaagttgtttggagacctgaatttcatcaggatatcaactcctgccttttaaaaatgacattttataatttgaagggtttctagattaatctttttaagattaaagtagtactttatgaaaactgatagaactattttttctttttttttttttgagacggagttttcgctcttgttacccaggctggagtgcaatggcatgatctcggctcaccgcaacctctgcctcctgggttcaagcaattctcctgcctcagcctcccgagtagctgggatcacaggcatgcgctaacatgcccggcttattttgtatttttagtagagacagggtttctccatgttggtcaggctagtctcgaactcccgacctcaggtgatcacccccgctcggcctcccaaagtgctgggattacaggctgagccaccgcgcctgactgaaaactgatagaactatttttcaaattaaaagtgctacttggctgggtccagcagcacataccagtaatcccaacattttgggaggctgaggcaggaggactgcttgaggccaagagtttgagaccagcctgggcaatattgtgagatccctatctctacaaaaataaaaatgacttatgacataggaattaaaaaaatttcagagatggggtcttgctatgttgcccaggctggtatcaaaacttctaggctcaagtgatcctcccacctcggcctgctacatcagagattacaggcatgagccactatatgcctggctgatacaggaatttgatggcatttttcattggccaaaaaaatggatagtcatggttacctgtcatacagccaggaaatttgaacaaatttggaagctttgacttctaatagattcaagatagcattcctttagatagagaattaataacagttgcttaacagcacccaatacctttttgccagtcattaaatttagcattaagaaaaatatcagggtatctttaaagttaaaactttgatttccttaaaaaaaaaacttgataaatcatggaaactgataaaacatggaaatatattcaataaaaaggggtcccaacatgaacataccatttcaaaatatggtaacaaaaacttgaaactcaattactattccttattggaatggctctaacagttcagaaataggattttctaactggccttcaaagtcagttcttgccttgtgaatatataagtatttacctagtccatgtagcccaagtaattctgtcaatagcggcatgatccataagatgttttcctgaaggcacttcatagacatgccgtttatagcagccactagagacctttttcatcagattaaaatgggacaagaattccattaggtgagagacaaaatccacagggggtttacagaatactagcatattgctacttgatttacatgtctaacattattaagtatgcaaaagatcactacaaaaacttaataggagaaaagctctgataagtgggggaggaaaggggagctgtaggtcagaaggtacaaagggaggagttgagaagctggagctctggagctcaggaactttaaatgcattcactaacacgaaatgtaaaagcagaagaacttgccacctgggtatacagtattggtactgtacctggagataactgctatctgcagagaagtccatttgaatgacaaagcttggaatgtctttgcagtagctgattctgttaagagtggggcccagcgttaggtcataaaaatccactgagttctcactagaacctactgccagataccgggaatccggactaaatctgaatcaaaacaaaacgtaaaaagtattagaccacatgaagtattataaatacttaagatcagtgacttttcctttctagttcttaaaagtaacgtgtgataaggcctcaaatagatttacctgtcagacacaactgatcatgtatactgagattgtctgggttacatgaaataaggaagctttatattttacttaaattttaaatatttccccaattgtcatctcccaattcctttaaaaacgtctaatggcttaaaaaaactttcttaggccaggcccagtggctcacacctataatcccagaactttgggaagcggaggcgggcagatcacctgaggtcgagagtttgagaccagcctgaccaacatagagaaaccctgtctctactaaaaatacaaaattagccaggcatggtggtgcacgcctgtaatcccatctactcgggaggctgaagcaggagaatcgcttgaacccaggaggcacaggttgtggtgagctgagattgcaccattgcacttcagcatgggcaacaagagcaaaactccaactcaaaacaaaacaaaacaaaatttaattttttaaatagaggcggggtctcactatggtcccaaactcctggcctcaagcaatccttcccccttggcctcccaaggtactgggattacaggtgtgagccacaacacccagtcagaacatctcagcttttaaaagccattagcattacataattaataagctaacaattcattaagatagttttcttccatctggaaaaaacgttgtcttaatattaagcaaagaacacagcccagcttaactaacctccagttattaaggtgaaatgacacaacttgaatcttggaagaagaattttttttttttgagacgaagtctcgctcttgtctcccaggctggagtgcgatggcgcaacctccgcctcccgggttcaagcgattctcctgtttcagccccctgagtagctgggattacaggcgcctgccaccacgcccggctgatttttgtatttttagttgagatggggtttcactatgttggccaggctggtcgagtactcctgacttcaggtgatctgcctgcctcggcctcccaaagtgctgggattacaggcatgagccaccgcgcccggcctgaagaacttatttaaaagacaaagtgaaatgctatttgcctagcaatctttggagtcatatgggacaattcagtctcttgaaatggcccatgagtcttactgaggtacgatagagacatgtaaaagctaagggaagccactgttactattttatatattgaagttctgaggaaggtttcatttgtaaaaggattttactgatgaaaagtgtacaagcttttgacagacctagattcaataatcttatctactgatcacacggaagtactccgtaaatggtagccactgttgaaaaatgcttaagcactgaaaaacaaaggtttaagaaacatttaaattaatttggattctggaacatttaatcaataggtattgattaaattaatgaactacatattcccaaactgaggttactaagagaagatatgtttgaaatcacaactttagttttccagggtgacaacttttgaagggcagatagctctcttgtattacagtgggagatacctcttggtgggatgaacttaatggacatggctaagtgttaacatgaattcatcaaacattacctactagtacttgctattatagttggtgcccagtgggtttataatttagcaagaagaattaagtagtatacaaacagccatattttagcatacaatttataatacgggaaatgctacaggccctggggacctctttttgaaggcaaggctatggaaaattttacaaatggaagttaaatcaagtatatactagaaactctattccatttgttcactaacctgatatcatggattgcacatctcctgtctctcttctttccccatatttttagagaactcactagtaaaatgataaattctccatttttcattccaatagccaccatgtccccttcagggctgtaacacacagtacgagcagcatgtcccaaattcactttgtttaacatcttctgcatttaaaaaaaaaaaaaaaaagagtcataggaaacattaagtgaagtacttctaaattataccagtttcccctcaaaatgctcaacagaattctggcagttctttaagtactagcaatttagaacttccaacttttctttttagaagttgtaacctcttttaaaaaaattatctgtacttactttatcagcaatatcccaaagtctcactgtcccatcttctgcagcagaaaggaaaaaatccctggaaggatgtgttgctagtccccagattggcccatccacatgaccgttaactaaaatattacaagctgcatttttctctccaacttcgattatttcagcattccttgtcccaacaaggatcttgccctgaaacacaagcaggaccaatacagtgaatgtaatacaacagctgcttttcttcttcataatataaaaatgaccctattgacctgctttcagagaactttttgctttgagctaatctagtagcaaggcagtcattagctcatgcaaatttttctatgactacaggcacacatctatctgtaagcacaatgggctagattacatattagagtccatgctacagaatagaacttttctgtggcagtacacctggattcttcaataatcaaagtttttatttgataatcttaggatttccaaactggggtcagtgcagtgggatataggaaaaaataatagaatttattttttagttaaaaagtaaaagcttaactacaatttaatatgcaggctgaagataatatccgtatgatttataaatacacttaataagtacaaacacgctcaaaaattttcataggagttgtagttttgaatttttattttgaaattgacacataattatacatatctatagggcatagggtaatacgcataaccatcacctcagacatttatcatttctttgtgatggaaactttcaaaatcctctcttgtaaatacctgaaaatacataaatacgtgattcttaactatagtcatcctacagtactacagaatactaaaacatactattcctatctggctgtgtaaacttgtatcctttaaccagtccttccctatccccctccccctcccccttgtccgcctccagtaaccactattctactctccacctctgtgggatcaacttttttagtttctgcacaggagtgagaacatgtatttatctttctgtgcctggcttatttcacttcacatcatgtcctccagtctcatccatgttgccaccaagaatgacagaatttcattattttttatggctgagtagtatttcattgtttgtttactgcacgttttatctagggaatgtgtgtttttttaaaaaatggagacagctgtcctaatatgagtcaactgccaagggctttcaattatgtctactagagttgttaaattggcagattctagaaaatattggaggtttacatacagtatttagacagaatagcttcctagcttatgcaccacactggtgctaactttggcaaagaaagcagcaaagacagagtaatgttggcaagcaaatccatcgttatgcattattaagtattgttcattaggctgcaaagggtgagggaatcacagtaataaccactttctgttttctgctgcactgtatcagctcatggaacatcttactttgcctctgcacacagaacgaacacaatctgtggcttgtcctgtctcaagcctgaaggcacggcaccgcctcagttcctgatcccacagtttaaccgctcctccttcttttgacctaagtaaataaccaagccagagtaagtgttcattattggctactataatttttattataaacaaataccaagttataagcagaatcttttttttttaaaaaggccctgatatttataatttacctctaatattcttgtaaactttctatggcaatttgaggatatactatatctcagtcaaaataaacatccagtttcagtgaattttattttgagaaatactctttttttctgacatgagcataattttatttagcctctacaatacattacaatacattatcctctctcataatacttttttttttttttttaagatgtagtctcgctctgtctcccaggcttgagtgcagtggcatgatctaggcttattgcaacctctgcctcccaggttcaagcgattctcctacctcagcctcccgagtagctagcattacaggtgtgcaccaccacacccagctaatttctgtatttttagtagagatggggtttcaccatgttggccaggctggtctcaaataccttgacctcaggtgatctgcctgcctcggcctcccaaagtgctgggattccaggtatgagccactgtgcctggcctcataatacttcttgattaggaagatgtaaaaaaacaattttattaaaaggataatggaaatgtaaggcaaaataatagaattacaaatgctatgctacagagttgatttatttatttttttgagacagagtgtcgctctgtcacctggcctggagtgcagtggtgtgatctcggctcactgcaacctgtgcctcccaggttcaagcgattcttctccttcagcctcccaagtagctgggattacaggcaccatgcctggctaatttttgtatttttagtagagatggagtttcaccatattggccaggctgatcccaaactcctgacctcgtgatccgcccacctcggcctcccaaagtgttgggattacaggcgtgagccactgcaactggcccagagcttatttttgaaggccaaaacagaagcatatttattccctatcaggtgttaaaatatctcactggaacagtttagcaggcttctagtgagtgggggtgtgcaggagtaaatgacgtgggaaatacaagtgttggaggacgaaatagagcccatttatggattttattcctggaagggctgaaaaatgtattccttccttttctgctagatgaattgcttgtctgaaagcatgcctatgtgcattcttcctttatgtaaaaggcacaaattctgcgcttgtgtttaattaacatatgtgggttctttcaatcctgtattgaaatgtacttcttagtcaactatatgtcacatttttttttgtttttgtttttgttttttaaatggggtctcactctgtcacccaggctggagtgcagtggcaccatcacagctcactaaagccttgacctccccaggctcaagtgatcctcccacctcagcctcctgagtagcagggactacaggcatgtgccaccacacccggctaattgttgttttttatagcgatggggtttcaccatgttgcccaggctggtcttgaactcctgggctcaagcgatccacctgcctcagcctcccaaagtgataagattacaggtgtgagccactgtgcctggcctacatgtcatgtttcaacatgcatatgactatgttggtgacaaatcaaatcataagtatctggttactgttgggagatttgaaaatcactcagaagagacctcttctcaaattttgaggtcttgtataaaacagtttaaatttgcctcaagcaaaaggaaacaaggcagttctctctagttccctcatccttttctaaagcaacaatgtgcattctactccttagaatccattctgaacaaaaagagagcaggcagtcaaaatacaaccctggctccagattcccccatgggcctcctactcagcaaatcatacacaggcatacagacattaagaaaagtaactcaacttgtaggacaactacctatccacacctcagaaaaagtatcaccccaacatgaaaaaaattggaagtgaattaagaccagaaatgagaatcaaatagaaggcacataaaaggtaataaaggagaagcatatgaggaggaaggtcggagaggacactctgtgtagcctagaaacaactagaataattaactgcaaacctcaggtaggtcacaaatgcataaatattctgtgaaaagaaagaggactcacggcctttcctttcccccagtcacgataagtccatctcgcagggtggtgtacatggcaaacacaggcccgttgtgagctctcgccacgattctacacaatatgtgatctttccacacacagacatcaccactgatggtacctgtaaacgtcaagttattctgaaaaggagtgggggagggggagacaaactcatcaaaagttcaaatagagtttaaatagataattttctatgtatgtgtaatgctgtctcacccttgatacaaagagcatgcatcgtgtagtggcagcagcactgaattcacgagtcaggaaacctgaacgggaggcttagctttgtcaggaccttttcctttccaagtctgttgcttattagctagaataaccttagacaattcttcccttccaattctaacatactataattctagggtttattttttatttttttgagacggagtttcgctctttgttgcccaggctggagtgcaatggtgcgatctcagctcaccacaacctctgcttcccaggttcaagtgattctcctgtctcagcctcccaagtagctgggattacaagcgccagccaccacgcccggctaatttttgtatttttagtagagacagagtttcaccttgttagccaggctggtcttgaactcctgacttcaggtgatcttcccgccttggcctccctaagtgctgggattataggtgtgagccactgtgcccggcctgagccacggtgcctggcctggtcttatattaagaatacccaaaatgttcaactgaaatttgacatggcacaaacatttcaatagtctttttctcaaaaatgtaagtgtacttaaatattctaaaattataacttttcctataagtattgcataatcacaaaaacaaaaaatgcacttagtttttcgatgcaccaaaggatttatacagcctagccaatgcaggatattaaaggaaagagatgtggattggaagccacaggtccagatgagatggaataaagtgagaggagagcaggtctcctgaacacccttctgtcagggccaggaattgtgctatttccttctgtctcactacctccttcttccctcgaagtagagacactggcccagagcacttccagctgtatgataagcagtgtgttaaatgataaaaagcaaaggaaatcctaaaccctagtaccaccttaaatcatttgaaaatcatgtttcttgatttacctttctctctgacaaatttttaggactatgaagaactactaggaagacagaaattttaggatatttagggtgacaattagaagattaaggaaggcttttgagtataacagtagtccaaggaatcaaatgttcatcagaatccttattatggtggctcatgcctgtaaacccagcactttgggaggtcaagatgggaggatcacatagcttaggagcttgagaccacctaggcaacatagcgaaaccctgtctctactaaaaatgaaagaaaaattagcctagcatggtggttcctgccctgtagtcccagctactaaggaggctgaggatcacttgaacctgggagatggaggctacagtgagctataatcgcaccattgcaccccagcccaggcgacagagtgagatactgtgtcaaaaaaaaaaaaaaatccttttccccctctcattaacattcttttcactccctaatttctgaaagaactagatttttgaaagatgaaatatatgcttgaccagggcatgtaatgattagcagatcacagtatcatctcaacaacattcatgtggctgatgatctaaggcaagagaatgtaaagtagtcaaagtcacactatgtgcattttaagagacatactgcaccaaatgcaatagcgagcatggtctgcatccgggcatcttccagtgtgctcagtagcccttttttgctaagaagagctcttcctgccagggtccagaacttcacatgttttactcccactgagacaaactgggtatctgaatctggtcggaattctgccacaaaaatacgttgattgtgaccagctctgctggcaattttggcacctgacaagatacaacaaaattatctaggttattacaagaaccaagctaatcaacagcatcaaacaaatatgtaaaatacatagttcaaaaaacaaaggcttagaagagaggccaatggcccctgctctactacctagcaatacatgatttacaattatttgtgtattgagtccttttcacttatcttcgctccattaacttttctttatataacgtaaatgttttgtctaaagtgtggtaggtaatattatcctgctgatctgccattatcattagaaatatacataattttcataagaatctccaaaaccaatcaaatcattaataataaatacatagtttcttgctggaagaaaatagcagtgaatcatttataatgctaataatggtttcattaatttatctgttttgtgaggttacagttccactgggcttttaaagtgaaatatacctacagtaccactgtgtacagtatattgcataggcctccactgaatgattgtttcaaccaccaactttaagacaaatattaaatacagaattcctacta

SEQ ID NO: 15890 - DNA, 49438 bp, Homo sapiens
actccggcgcgcagtgccggccggggcggggatacgccgtgtgcgcggccgggggcggaacggaggaggaggcggtggtgtcccggctgcggggtaggagtccgcggcagcctccgggtaagccaagcgccgcgcagtgctgagttcccgcacgccgcagagccatggagatcggcaccgagatcagccgcaagatccgggtgaggcccgtgccggtcgggggtgggaagccaggtctcggcgagcgggcggttgtcaggagtaacggggactgtgggcccgggtggacgccgcggcctggcctccgctggacgctcctggcgggctgcggctcctcctcgtccaggccgcctcggccctggggacatttgcggcctcggagcgtggctgcggctgaagtagccgccgggaaatggaaggacaggcgcaggcccggctggagccaccaccgcggcgcacggcgccgctttggatccgctgcgggaggtgggcgccgcggggctggggctggagctggagtggggtgcggggtggggggcggtgcaggcgaggctcctcccagcccccgcccgggggatccgaggtgcgcgcaccagcaaagtggcctcagccgctgcagagtccggtcttgttttcctagagccgcctttctcacatgcacgtttgctctttttctctcagagtgccattaaggggaaattacaagaattaggagcttatgttggtaagtgtttttttggttgttagtcttacagaatttagagtttgcagctaatagaattttagtgaatgcgtatttctcaccgtactttggacattgggagagactcccttctaccttcttcaaatcttatactccctggttacttctttatcatctttttgcaaccttgttttttttctcccaaacctccttctgttatggtgttttgaaatttagtttcctccgttaaggctctgtttgaccgaattttattttatgtttttcctattctctctctctctcattttaaattctagggacgggtctcgctacgttgcccaggctggtcttaactcctgggctcaagcaattatctgaccttagcctccctaggtgctgggagtgcggggattactggtgtgagccaccatgcctgtttaaagtttcctattcttgttactttcctcttgacatttgtttttagaactctgatgttggatgtgaatgtttgatgctttctggcatttgcttctgtaatggttcagtgagttttattttccgatctctttatgttttccctctctctctgaaacagtaaggctttttccgtctctttattcttttataatttgagtgtttactctgggtcaggtactgtgcttaactattgtatatgtattaactcaggataatccctacgagaatcctggaaggtaagtggcagtatctttgactgtgtaaacaaggaaactgaggctttgcctacttgagcaaggttttatggtttgcccccaaagctggtgcctcctataaaaataatagctaccactaatgacagtggttctcaaagtgtgggagactccaagggcctctgaagtcaaaactgttttcatattaatactaagatggtatttgttatttttcactgtggtggtggtgtttggattgtgtaaaactaatggttgataaaacttgtcagcatagtaacaccataatgaaatcatattcaaatcactccccccttgtagtttttttctttttgagccaattacacttaaaatgtcattgatgaagatgtgaagtccagggtttacaaaatattttttatcttcttagtattcagtgcgaggaaatagaaatgctcataaaacatttttattgtatactgaaatacgattgttctgaggaaaatcattttagttgagaactaagctagccacctctttcagggaacatcatttttaacttcaaagtactgacaaactggttacatacactaggatatttggcagatatttacttgaaagtgagcaaagaaaagaatccatagtctttgttgccaatcacatgtgagctttcaaatgaaaattagaattttggaaaatctgagcctgcctccatgaatttcacagcttcccagtacttaaaaaatttctgattaaataaatggtgatttaaaaaaaatttgttattattattattttttttgagatggaatttcactcgttgcccaggctggagtgcagtggcgtgatcttggctcactgcaagctctgcctcccgggttcaagcgattcttttgcctcagcctcccgagtagctgggattacaggcatctgccactacacccagctaattttttgtatttttagtagagacagggtttcaccatgttggccaggctggtctcaaactcctgaccttgtgattcgcgtgcctcagcctcccaaagtgctgggattacaggtgtcagccactgcatccggccaactcaatggcgatattaaaaaataattattttatactgcataatgaaatatatcaacgtgtcagtggtttttgtagctaagtgaaccaatcttttctaaataaccaatgcataatattacaaaattatgcagtggattaaagatttatttaaactctggggtgggtcagtggatttttgtgcaacagttcaaaaaggtcattgacgtatttgacattccacgttgctttaacatttaataagctaccacttgtttagttttggtgtagtgtcacagaagaatatccaccttatctgaaaagactatcagaatactcctttttcaactgcatatctgtgagaccagattttttcatattcttcagtcataagcacatagaacaagatatataaaaatatgaaacaaggccagtctttgcagtaaatttttctttttcttttttttgagatggggtctcactctgtggttcgggctggagtgcagtggtgcaatcttggctcactgcaacctccgcctcccaggttcaagcaattctcctgcctcagcttcccgagtagctgggattacaggcacctgccaccaccccgccccccccccccggctaatttttgtgtttttagtggagacggtgtttcaccatgttggccaggctgatctcgaactcctgaccttaggtgatccacttgtctcagcctcccagagtgctgggattacaggtgtgagccactgtgccttgcctaaatttttttttggaaaatttaataatgttacttgtgttaatataattggatttgtgattaacatgtgatggatttattttttaatgaattaataaatactttttaattaaaaatgatcagttctaattttgaacaccataaataatagaacctgcataaaccaaagaaggggcccaagaccaaacagtttgagaattggtaatttatggagtacttaccaccatttgctgggcactttcataaacgatttgttgtcaggattgttggaagactaacagatgagagaattgaggctcagagaaaataaagctgaaccaagatttatttattcttttattctttcaacacttgaactgcattttttatagttttctttgaaacaaaaaaagtacttctgaaatgaacctttctgcctgcatagaaatattacaagtatttaaggtattaaagaaatttgtcacagcatggtggttcacgcctgtaatcacagcactttgggaggccgaggtgggtggatcacttgaggtcaggagttcgagaccagcctagtcaacatgctgaaacctggtgtctactaaaaatacaaacattagctgggtgtggtggcaggtgcctgtaatcccagctactcgggaggctgaggcaggagaatcgcttgaacccaggaagcagagcttgcagtgagccgagattgtgccactacactccaacctgggagacagagcaagactctgtcgtaaaagaaaaaaaaaaaaaagagaactggaatggagttttgagggtcagagattagagttcctgataacagcttttgcttccttatcttcttagtgaggtttttgtttttttgttcttttaaatcctagacctcactctcataatcactgtaggattaccactaggagggtgttttttggcttcttttatttattttatttatttatttttttttgagacagagtcttgctctgttgcccaggctggagtgcagtggcaggatctgagcgcactgcaagctccgcctcctgggttcacaccattctcctgcctcggcctcccgagtagctgagactataggcgctcaccaccacacccggctaattttttgtatttttagtagagacagggtttcactgtgttagccaggatggtctcaatctcctaaccttgtgatctgcccaccttggcctcccaaagtgctgggattacaggcatgagccaccgcgcctggccttttttcttttttttttttttttatcctagacctcacccttataatcattgtaggattaccactgtgagggtaaaaccgtgcattgagttgacattatttaatgttaaaattgatttttttaaatgatgtggagcttttgggtctatttgtttattcgatgttgctacaagtttgttactgtgagtaattgaaacctgcctttagcaagggtaaagatgttcacttgagaaatgagtgttattttgaaactttgcaaattaaaactaaacaaaactcaattctttttcttggggaatgttcaaatatttcccataagcttctttgaaattaataagcattattaaaaagattcaaggaagtgaatgcatgctcaagtttgaccctataattcagaatgtttagttttgtaagtatcaattattcttaatttccattcttctagtatttgaaatacctgtggaatgaagagaaaaaaattaaagctaagccatcttgtccaatgtaattccagtagagctctgcgactctaaagcttagagctacatctatattttcaagcacatcaactttaagaagaaagttttgaggaaacaaagttttgatctacctttccttttaaatagatgaagaacttcctgattacattatggtgatggtggccaacaagaaaagtcaggaccaaatgacagaggatctgtccctgtttctagggaacaacacaattcgattcaccgtatggtatgtttctgaatttttgtgcctcagaccaaagtttggcacaagcctgagttgatattctgtccaaagagaggttcttgacacttgagttaggtttactttggagaggcagtttgtgagtgatgagagcacagcctctgtattagtccattttcacagtgctatgaagaaatacccgagactgggtaatttctaaaagaaagaggtttaattgactcagagttccacatggctggggaggccccaggaaggggaagcaagcaccttcttcacaagtcgacaggaaagagaagagtgaaggaggaacttccagagacttatataaaatcatcagatcttgtgagaactcactgtctcttgagaactcgggaactcactgtctcttgagaactcactatcatgagaacatcatgggggaaaccacccccatgacccagtcacctccctcccttgacaggtggggattacaattcaatataagatttgggtggggacacagagccaaaccttatcagcctctgaagccagacagccaaagttgaatcctggctgtgtcttgccttggtttctctagctataaaatggaaatagtacagccacttgctttataaaattattattgaggatcaaatgggctaatatgtgtaaagtacttataggtgtccctagcattttcctaaggaattcttagtatatgtcggctatacttaatatgtttcttttgtaaacttctatatctttttttttgagacagggtcttgctctgtcaccaggctggagcacagtggtacaatcatggctcgctgcagcctcgatctcctggtttcaagtgatcatcccattgcagtcccctccttcctgaactcccatgcctgactaatttttaaattttttgttcagacagggtcttagtatgttgccctggatgctcttgaactcctgggctcaagcagtcctcctgccttggccttcagaagtcttggggttataggtatgagccactgcacctggccagcttctgtatcttatagttccttttcccccaccaaaaccagttacagatgtttttttgaactgggttggcttcttacattgccttttacaatgagttacctttagagggcaaggttttctgtttctcacttttctgtttcttactttttaagctttttgttaaactcacaccttcattttgagtaataattgtagtgtaatgttacagcatattttgagattataagtttttttaagtttggaattttaaaataggcaactttgcttttatacataaattactgttatatgcctttagttgagaatactgactagaagagtaagattcaacttaagatgctaggtcctggtaccaggtttgaggtaaagtgaggatgagggctggaggataatgatgtagctgagaatagacagacgaaatactttattaggcttctcaggctaggaactaccagttaccgtgaaaggtgatgatgtagcagaagtgagcaagtggcctgccgaatttgagtgcaagaggaggcactgagtggggagatgagcctggttaagttcttgcctttataccaaaggtcgtcttcaaggtgtttttgcccaagtaggcaactgtatgcttatcaaccgtcttgaaattctgcacagaattctctgggtttatacattgcacaaatttgaagaacattgtatagtggtcatcagttgttatgatacactgctgcctcactgtgggtgacccaacccatttgttacaatttgtccccagaggttattccctcccagccccccacaaaaaaagactgtgggtcttttgactgggaaaattaccattattgtgagtactatttttttttctaaagcgaccgagtagatccttttctccgataacttgatagaatacttagatttttaaaacagactaccaaatgaatttaaaaccaaattaattcaacattctcatctggccataaattgagttctttaacatgtagtgaagcaaagggtgatgtccccattttggcactttgctttcttaagttagtgttcattaacaccagccccaaacagactattgtgattatttggagccttgaagtaattgtgtccgtggggacagtagcatgtgactagggttctcattgaaacatgaggtttctggcatattttgagaggtactgggaagggatgtaaggcaaagtacctcatttataactaccaaaacaggttatgttacaagcaagattacagccttacagcatcagttttgaaagtaatagagtgaaatgatatagcatagtttgagattataacttgttttaacctctcagaattaagttgtccaagacaccatctagtttaagcagttaatataagctgcttaaatggtggtaataataagcaatattacatgtttatgatacttgttttactgtaagctacagtaaatctttagtacttacaaacagggtgacatattttgtagactaagactggtcagatgatattctttcccatatttttgcagaggctagatgttgaaaacagtgaagaaaaaaatacaattttttattgacttctgtaggatttatacaaagcccttttttaaaaatgtgaagtttgaaagttcataccatttattcactaaatacagtttatcagtatttatctcagctaggtgcggtggctcacgcccgtaatctcaacactttgggaggctgaggcaggtggttctctcaagtccaggacttcaagaccagcctggacaacacagtgaaaccccatctctatttaaaaataataaaaatataaaaaaatttaaaaaattatctctgaatataatgtcataaatttagagtgacagttgaaatgaaatctttcttaacagaaggtttatttttgttttttgtttttttcctcaggcttcatggtgtattagataaacttcgctctgttacaactggtaagattcataacttttttttttaatttctgcttgctatggcatatgatttgtttctttctaaagtcatagtgctttgggaaaaacccatcaatttcaaaacggttcatttgaacttttttagaaagcacatacttttatgaacttaagagcagtaaatttaacataattcaaagataatttaagtgtgggagagggagcagtgcactttatccgaaggaaataattacatatatgtgcaaagatttagcctcaaggatatttcagtattttataattgaaaacaatttaaaagttcagtcataataaacgaaattgttgtattaccatgtgtggaataatatttaactattaaaaataatgttgtggaagaataacagaatatacacgcataagatacatgttttaaaaaatgtgtatatatgctcttcccccgaaaaatcacctttgagataattggtgatttttattatatttttaaaattttctacaataaacatactgcttttgaattggtgatgaggaaggaaacgacttaaagtaataaaaatagatggccgggcacggtggctcacgcctgtaatcccagcattttgggaggccaaggtgggcggatcatgggctcaggagatggagaccatcttggccaaccaacatggtgaatctccgtctctactaaaaatacaaaaattagccaggcatcgtggcacatgcctgtaatcccagctacttgggaggccggggcaggagaatcgcttgaaccagggatttggaggttgcagggagccgagaacgcgccactgccctccagcctggcgacagagcgagactccatctcaaaaataaataaataaataaaaataagaaataaaaatagattaaaaggactgtatttttcttttcagaaccctctagtctgaagtcttctgataccaacatctttgatagtaacgtgccttcaaacaagagcaatttcagtcggggagatgagaggaggcatgaagctgcagtgccaccacttgccattcctagcgcgagacctgaaaaaagagattccagagtttctacaagttcgcaggagtcaaaaaccacaaatgtcaggtaagagtctggtgtagacctgctgggggcagatggctctgtgtatgtgacatttatattagtttttatatctttcagtttgctgttctcagcaatttttagaaacaatgaagtgatcgtgagtagttttttgaataaaataatggataagatctaagtatgattatcttttatcacaaatttagtaaatcaaagttgaaagaaagtgcaatttcaaagcagttttgaatggaatatgtaaagggagtatcctcagttttttcattgaaatttttcaagtaaacattctttaaagatttggtgataattgccctaatttggctgtaatacattttgttgttcttttaaatagacagacttacgatgatggagctgcaacccgactaatgtcaacagtgaaacctttgagggagccagcaccctctgaagatgtgattgatattaagccagaaccagatgatctcattgacgaagacctcaactttgtgcaggagaatcccttatctcagaaaaaacctacagtgacacttacatatggttcttctcgcccttctattgaaatttatcgaccacctgcaagtagaaatgcagatagtggtgttcatttaaacaggttgcaatttcaacagcagcagaatagtattcatgctgccaagcagcttgatatgcagagtagttgggtatatgaaacaggacgtttgtgtgaaccagaggtgcttaacagcttagaagaaacgtatagtccgttctttagaaacaactcggagaaaatgagtatggaggtttgtatgtacttttaaattctggcttaggctaaaaatcggcagttcttgataccaaataatatatgaagtaactaaacacatattccaaggctgggcacagtggctcacacctgtaatcccaggactttgggaggccgaggcgggtggatcacgaggtcaggagattgagaccatcctggctaacacggtgaaaccccgtctctactaaaaatacaaaaaattagccaggcatggtggcaggcgcctgtagtcccagctactcgggaggctgaggcaggagaatggcgtgaacctgggaggcggagcttgcactgagccaagatcgtgccactgcactccagcctgggcaacagagcgagactccgtctcaaccaaaaaagaaaaaacaaaaaacaaaaaaaacacatattccaaatttattttattttattttactttttgagaaggagtttcactcttgttgcccaggctggagtgtgatggcgcgatctcaactcactgcaacctccacctcctgggttcaagcgattctcctgcttcagcctcccgagtagctggtattacccgccaccatgcctggctaattttttgtatttttagcaaagacagggtttcaccgtgttggccaggctggtcttgaaatcctggccctgtgatccacccaccttgatcttggctcactgcaacctgtgcttcccaggttcaagtgattcttctgattcagcctcctgaatagctgggattacaggtgtgtactaccacgaccagctaatttttgtatttttagtagagatggtgtttcaccatgttggaccaggctggtcttgaactcctgacctcaggtgatctgccctccttggcctcccaaagtgttgggattacaggcatgtaccatggcgcctggccccaagtttatttttaaattgttttatctgctgtttctcatgctataccagattttcttccccatggcttgctcctagagttcttttgtatcacatctgtatacctttttgggatttccagcatttgagatattaatcttaaattaatttggggggtttcaatcaattttagattgttcatggtaattgctagtgagcaaccaattaactctgttttattagtttcctcaatagcactatatgcagctgttgataaaataaatgtaaagttctaatttttgttttagctaaaggttgactgttagggataatatttatatttatagtatttatttatttatttattttgatacggtgtctcactctgtcgcccaggctggagtgcagtggcatgatcttggctccctacatcctccacctcccgggttcaagtgagtcttctgcctcagcctcccgagtagctcggactacaggcacatgccgccacgctcagctaatttttgtatttttatagagacagggtttcaccatattggccaggctggtctcgaaatcctgaccttgtgatccgcccacttcggccttccaaagtgctaggattacagatgtgagccaccacacccagcctcatatttatatttttacataaaaccaagaaatactctgtgaatttctcatattactgtgtactgtttttttcttaaaatggaaacattttgtggtagaactcttgttattttctgagattaggtaagcataaattttatctgattgcaggatgaaaactttcggaagagaaagttgcctgtggtaagttcagttgttaaagtaaaaaaattcaatcatgatggagaagaggaggaagaagatgatgattacgggtctcgaacaggaagcatctccagcagtgtgtctgtgcctgcaaagcctgaaaggaggtaccttgaacatggctgtaaattaatctttaactgccttggtggagtcttcctgatttattgaagagaataatcacgaaaataatttttgtttgttttttgagacggagtctcgctctgtcaaccaggctggagtgcagtgccacgatctcggctcactgcaacctctgcctcccaggttcaagtgattctcctgattgagcctcctgaatagctgggattataggtgtgcactaccatgaccagctaatttttgtatttttagtagagatggtgtttcaccatgttggaccaggctggtctcgaactcctgacctcaggtgatctgccctcctcagcttcccaaagtgttgggattacaggcatgagccaccgcacctgacataaatatttaatgtaataccgtgtaagacttttccattgggttttgagaaacacgttaatgagagaaattgcttaacattggagaggattgcagagaatattgactaatatggtggggtgaggaggaacaacatcaattaagattcagatttattatttaaaaaaactaaaaggggcctaggcatggtggctcatgcctgtacctagcactttgggaggctgaggcaggaggattgcttgagaccaggagttcgagaccagcctgggcgatgtaatgagtctttgtctcttaaaaaaaattaaaataaattagttggtcattgtggcaggcacctgtagtcctggactggagaggtggatgtggaagcattgcttgagcctagaagtttaaggctgcagtgacatcacactccatcctgggtgagagagtaagagtctgtctaaaaaaaaaaataaggttccagtgtagttggcattttctaaaaactgcagctagtctgtttaaaacctagagaaggttgtggtaaaggcataatagatggctggcctgtgaggaactgaaatttaaagtttaataaaaatacctttcttaactcttttagaccttctcttccaccttctaaacaagctaacaagaatctgattttgaaggctatatctgaagctcaagaatccgtaacaaaaacaactaactactctacaggtaatttaaatgtattatgtttacacttggtaagacatttctgtaattcttgagtaaggtgaaaatgattgctccttaaattgtaaaataaaggtgcctgtcagatgtcaagaccaagatgaggttcccatatagaaaaatggctttaaaaggaaattgacaagtttgagaaacttcgccaactgttattggactgtagtttttcaagcaccatataatgccttttatatctttccaatgtgtgtaaaatatatagtacgtaaatattttgaagagaattttgatgaagtaggactttcatattagtagcattagattcaacattagatatgaatttacgatgtgtaaaggggagtacaattggacaatgataggtatctgaagttatagaaatttgttaaacagtagtatataaacaaggttggtttcttcccttttggcggaactcattagtagaatataaggcagagaattgactcatttgtgatgttcctgctccaattctagtggaagtactgaataattttatgagagaatataaaagtattacgttttcaaaacaggagatgaatcagctgtaagctggtcttacggaaagctgattctgaaatgcaaacaactgatgggtgtcattttgtgttgtcaaattctgtactctctggccgacctgttgtagccaatgtgtaaacttgtgttaagaagctgatggtaatgagctactctaaaaagatttaagttttgctgtggatttggtgggtgtacttacagcattgccctgcttatccactctctcgcttttttttgtgaccccccttcctaaaatgaggtaaactgtagccatcagtttttttatttgttttctttttttgaggcgaagtcttgctctgttgcccaggctggagtgcagtggtgtgatcttggcttactgcaatctctgcctcctgggtccaagcgattctcctgcctcagcctcccaagtagctgggattacaggcgcccactaccatgccaggctaatttttttgtatttttagtagaggcggggttccaccatgttggccaggctggtctcgtactcctgacctcaggtgatcacctgcctcctcggcctcccaaaatgctgggattacaagcgtgagccaccgcgcctggcaccatcagtttttgatcctgatacttgtctgtcctcttggttctcctcatccctaatttaaccttgaacacaaaattcaacaggttttggcatatagaataaagattatcaggcaaaggcgcactcttgacctaatgatatatctacatttcatttcctgatctatcagcaatattaattgtctagaatgatgagaagtttagagaagttccatgactttgaaattttctttctttacctaggttatctaaattacaatttgaaactcatataagatcatgaagctaagcttaaataaaccgcattttgttgaaaatgaatacatatgtactatattgtattcatggtatgtggttgtatggatattgtttacatatgtttggataaataggttcaggtatctatctcagtaacgtaagaaaaaatgaatggtatctatggattgaactcctcatatatatgttcttttcttttctttttcttttttttttggagacagagtctcactctgttgcccaggctggagtgcacagtggtgcaatctcggctcactgcaacctccgccttccgggtttaagcaattctcctgcctcagcctcctgagtagttgggattacaggtgtgtgccactatgcccggctagtgtttgtatttttagtagaaacgaggttttaccatgttggccaggctggtctcaaactcctgacctcaagtgatccacccaccttgcctcccaaagtgctgagattacaggcatgagccactgcgcccagcctgaactcatatgtcctaaaccaaaggaggcatttatatttaatatgacatagtcactgtggagttttgacgtattactgcatttgtatttctatcttttttgcttttatgtgaaagttccacagaaacagacacttccagttgctcccagaactcgaacttctcaagaagaattgctagcagaagtggtccagggacaaagtaggacccccagaataagtccccccattaaagaagaggaaacaaaaggagattctgtagaaaaaaatcaaggtaataacttaaatgatgtttcactctttactacagttttttcatgaggcattgaatattttccaatggatttttatgaaatattacactatgaaaaaagtgatgattaagcccagaaatagaatgagaagaataccatgaggaaggttcataccaacacttcagaaaaaaattttttttttaaagaggtagggtcttgctgtgttgcccaggcagtcctcaaactcctgggctcaagcagtcctcctgcctcagcatccttagtagctggaggtgtgtacaagtgtgtgccactgcacccagccctttctagaaatttttgaaagtctttttattgtggaaatttttaatattctcaaaaatggaaaggctagtacagtgaactctcatgaacccagtcattaagccttagttattatcagaattttgctggtctttagatagctccttcttaaagatatatttatttctgcattctttctttttctctttttgttgatcctgcccgtttacctgaacttgaaattttagttacctttaaatctcccgtctcttaagcatcctgtctctgacctcccatatgtgtcccagcaaccctaatttatcccctcgtgcctaacatacttcagtttgcttccaggttttttttttttttttttttttttgcttttttctcagctttctcccccaattcctatacaatcttttgactttgaaagtgtgtctctcatcttctgactcctttgtgaaagtatctctcccctcctcctcattacccagaactaacgctattagtttggacttttggtgtctgttatctgacccctgggcctgcacagcccttctccatgactcttcagaccttttgtctcttttgtcgtcaagaaggattcttttttcttctgtttctttttctactaagatttgaattttaagaccccaccaaaaaaatctatatgcttattatgttatttctcacatacttttcaagaaccttggaatatattttttcatttcttcaaaactgtcctttaaattgttccaggtttcatgaaaccttatgatttcagaattgtcaattctgtatttgtttcctcattgtgtctctttaaaaatttttgactgtattgttcagtttgccatgacagcgttatatactattctgataattgataggcctgaggacaagacctgtttggtccccaaacagcagataggtaccaattggaaaatgtgaatgggccaaattgagaagaggagctgaaactgaggagggattttgctcagtgcagtggcagatgaggctgatctaaaaggactgcagtggtctactccctgtggagtctgtagtgtgttgcaccaaggttttcttcaaacacaggactctacgtgagagtcttggagtggaatcagatggagcagggaaacagacaatagagaaaaggaaagaatgtcagataaaaataggagaggaaaacaataggaaatctcaaagcaaggtgccatattttttaacatcacaaaatcaacagaagaaggttgttgattctgaagttagaatagctatccaaagcaaactttcccctaaaatgaacaacagaaaagtatcaaggtcaagtcctgtgccgaattaaaagataaaagggaataaaagacaaaacagcattgtttcaatgaaagcatgctgaaaggtataccaaaaagaaatacaatttcaaagtgagctagaagacattatttaaataatacaagacaaagccaagaaaaacataaaacagaagaactttgaggctgggtgcagtggctcatgcctgtaatcccaacactttgggaggctgaggcaggaggatcacttgagactagcctgggcagcatagcaaaaccctgtctcgacaaaaaataaaaatattagctgggcaaggtatacacctgtagtcctgtctccttgggaggctgaagtgggaggattgctggagcccgggaggctgaggtgggaggattgctggagcccaggaggctgaggttgcagtgagccacgatcataccattgccctccagggaggctgaggtgggaggattgctggagcccaggaggctgaggttgcagtgagccatgatcatgccattgccatctagtttgggcgatagagtgagactgtgtctcaaaataaatgaagactaaattagaaagaactcgaaagaattagtgcgtcttaataaaataaaacatgcgtgtaatcccagcaatttgggaggccaaggcgggaggatcacttgaggccaggagttgaagatcagccagggcaacatagcaaaaccttatggctacagaaaacagcaatttaaaaataaataaaattaaaacatcttcagagaaattgaagataaaagacaagaacattttaaaagtctaaaagggctcatgagaaagtggcaaatattgataataggcaatagaaatacagtgtttttatagtaggaatctccaaagaaacaatattcagaggaacagagcaaacattaactgtctttcaagaaaactttcatgaagtgaaaacatgtttgaaactgttgtctgaaaaattgtacagtatacctgagaatatttacccagaaccataacactaagatgtattatataattaatgaaattttaaaaagaaaaaaaatgatttggacattcaggcaaaaggggcacatgacttagaagaaaaggaaaggtagattatcatcaaacttttcaacagcatcacttttgtgctggaagaaaatggactagcatatttaagatactccagaaaagaaaatgtgagccaagaatttaatgtccagcaaaagtgacctttagaagtgatccagcaccaactgttatctatatgcagaaattcagagactcattcccatgaacttttcttaggaaatctaatggaggatgagcttcagacaagtaaaagcctgttgtcctgaatttacattggaaatgtttcggaactcacagtgtattttatatataaatacatttttttctagttctgtctactagaaggcatagaaacattcatcaacccttagcatcatctgtagttcccagattgtggtcttggaatacttcctatttaaaaaactaggcttcttgggctgggtgcagttgctcacgcctgtaatcccagcactttgggaagccgaggtgggcagatcacctgaggtcaggagttcaaaagcagcctggccagtgtggtgaaaccccatctctactaaaaatacaaaaaaattagctgggtgttgtggtgtgcgcctgtagtcctagctactcgggaggctgagccaggagaatcgcttggatccgggaggcggaggttgcagtgagccaagattgtgccaccgtactccagcctgggcaacagagtgagattccgtctcaagaaaaaataaaaataaaaaaacaaagaactaggcttcttgagaaatgtctttttccaggtctggggcaggaaatgttaacatgatcctggaatggctcaacatcccagatagcaaagaagctgtcaatgaatggtagaccacgtccaaaggatgcaggcgccaacttagaggtttccattggccaaaaatggaattatttgagattcagtaggtgtaaatatcgcggtgaattaaagcccatttaaatccacaatttcataatgacattttaaaaaaataagctctaactagtcaccttctggaaggtagtagataatcattcattgtcttgaaaactgggtaaataaaataattgaacatttatgctgtcttttctgtgagaacgataccactgggtaaccccataggacaggagttggcatctgttggaaccaaaccgtgcctattcatgtatgtattgtccgtggctactttcatactacagccttagttgaatagttgcaacagaccatatagcttgcatagcctaaaatagcctaaaagatttgccaacctctgatatagtagatgagagaaacattttcttttaaaatgatttcagctgataagagaacaagatggtaggattagagttatgcttttaagagtgaaaaccagttgttttgtgcctcttgatacaaaagaacagaacttttgtcttgccaaaaatgtaaacctaagtcatcaagctcccagtccagcagtcagtttgcaagaagttgcagaggccagaggagtatgttggttgagcttcaccatgagtgtgcagccggaaaaatagtgtttgggacactgtgggttgaatagcctgagaaattgagattaaaaggcaaatcaaaggaaaataaaaggagcaggattaaattgtagtggctagggatacccagtgtgtgtgaaattataaagaacctctaggcgttaatataaaaagcacatagtggttgcttttgaagaggaccgataaagatggagcacacagagaggcttctggggtggcagatgacgttctctcttttgacttggatggtagtcagaagggtgttttgccttacaaaaattcattaagctatatgtttgtgtggttttctatactgtgttttaaaaggggataattgaaatggtgtcaggtacctttgctgatgaggagtttggtattactagatatattcacaagtgtgaagtgatactgcaagcaactgttatctgttaatgtggttactcactgttgtacggtataatctggggcaggtttttaaaatataaacatgcactcgtattggcataagttgttaattttttttcttcttttgtttgagcagatagcattctctcatttctctggtgtctttatttttactagcgcacccacctcataatatgtgtactttttgctttttgtcttgccatcagtctgtcactagaagtttattttgccgatcttttcaaagacttaacaacattattctggctttattgatttttttttttttttggtgtttttgttttctatttcattgacttgtgctttttttttattttttttttttaagaggcgaggtctcactgtcacctaggctagagtacagtggcacaattgtagctcactgcaacctcaaatgcctgggctcaaatgatcctcccacctcagggaccataggcacacgccaccacgcccagctaatgtttaagtttttttgtaaagatggagtctcactatgttgcccaggctggtctggaactcctgagctcaagcagccctcttgcctcagcctcccaaagtgctaggtttacaggtgtgagccactgcacctggcccgacttctcttttaatttatccttccatattttaaaaattatttacctcaggctgtcttcttctcaaatgtaagcatttgagaagaatacatatgacaggttttaattcatcatgttttcattatcagagtgtctttaatttccattataattttcatcattgaaagtgtgttttctatacagtatttggaagtggtatgtgtttttgtcttttaatcctttttattatagacacctgacttaattgcattgtggttagataatgtaatttttacaatgcatagtttttgaaaattgttaacacttgcttagtgcataatcaagtttatgcatcttccacatgcattttggaagaaagtggactaattattggatggggaattttacatttattcagtagataaagctctactgttaacattattcaaatcttgaccttgctgagtttttgtgctgcttgacttaccacttgagaaagggtgttgaaattgcccaacatgatgacagatttatcttaatttctcttgtacttatatcaagtttttgctttatttttaggctgttatatactattaggtgcatacatatttaaatttgttatatcttctctgcaaattgaatcccttatcttgatttatgaccctctgcaaaaaagatgtttttatctcaaagtcagttttgcctgatattaatatagccatttaattatatttgctttatatatctggtttccctgcctttgttttcagttttctctctcatgctttaggtatatacagttgacccttgaaccagacaagtttgaactgtgtgggtccactcatacacttatatgtggatttttgaaaataaatatattggaaatattttttgagatgtggcaatttgaaaaaacttgtagataaactatatagcctagaaatagtgacaaaattaagaaaaatttaggtatgtcatgaacacataaaatatatgtagctactagactaacatttactatcttaaaacatacacatctattatgaagtttaatttatcaaaatatatgcacacaaacacagactttacatgataccgcttgtagttgagagaaatgtaagcaaacataaagatgcagtaatagctacataagatttactatagtacatactgtactactgtaataattttgtagttacctcctgttgctttatggtaagctaaggtgttttgagtgtccacttaaaatgctgtgtgatgcaaccatctctgcgacagttcagctctccagtaaattgtgaattgcagtgaaaggtgatctcgcagttcttgcatatttttcatcatgtttagtgcaatactgtaaaccttgaataacaccaggggacccataatgtgctactggtgatgctggacatgctcccaagaagtagagaaaagtcatgacattacaagaaaccattgctcagtatgtaccaaagatacatgttacaactgtggctgcagttattcaccatttctggataaatgaatttaacataagaaccatggttaaaaaaaaaagaaaaagaaaaaaatgtatgaagctgccactgcagctacgttggcaacagtaagtagttaaatgtttgggaagtcaaaagttgtatgtgggttttcaactgttgttgggggattggttcccttagccctcatattgtttaagggtcaactatatattatatcttaaatattataaagctggattttgttttttaatctcatctgagtttgccttttattggagagtttagaccagtcacatttattacaattactggtatagttggattactttctgtcatcattgctgatttgcatttgcctgcttttctgttttttctcatgttttttaaggttcattaattactgttattgttgacaaccctaaccctggttctacaattttaaactagtttactgtttaaaccttccctttctgttctttttttttttttttgagacggagtctcactttgttgccaggctggagtgtagtagcgcgatctcggctcaccgcaacctccgactccttggttcaagtgattctcctgcctcagcctcccaagtagctgggattatagacgcccaccactacgcccagctaatttttgtatttttaatagagacgaggtttcaccatattggccaggatggtctcaatctcttgatctctgatcccctgaccttgttatctgcccgcttcagcctcccaaagtgttgggattataggtgtgagccaccatgcttggcctcatttctgttcttttagtcgttaccagtgaaattttaccacacaaatttaatttagtattctaaaagttaatatcctgaccccactctcaaacagtaaaaggacttttgaatacctatgaagagcttcagtctttatcctcctcatttacttgtttccagtgtttcaatttgatcttttttaaaatgcacaagttgggccgggtgcggtggctcatgcctgtaatcccagcactttgggaggctgaggcgggtggatcacctgaggtcaggagttcgagaccagcctgaccatatggtgaaaccctgtctctactaaaaatagaaaaattagccaggcatggtggcacacacctgtagtcccagctactcaggaggctgaggcagaagaatcgcttgaacccaggaggcagaggttgcagtgggctgagattgcgccgctgcactccagcctgagcgacaaagcgacactccttatcaaaaaaaataagtaaaataaaatacacaagttggacaacatttttgtaattttttccaggcaatgttttttgaggtttacctcctgtttatcattttacttattcttaacatctctgagtgttatttggggatcattattttccaatattttgaagtatttttgaagtatttttttggaagtttcactgaaacatgtctgttggcaatatattttccaagagtctattcacctgtgagtgttttctttctttgtgttcttgtgcagtagttttgctggatacccaaatctaggttgttagttatttgctctccacaccttatatatattattatcccactgtcttctgctttccattgttgagtggacttctatcattctaattgtctgtcgttcctttgtaggtgatctgtcctttctctctggctgctttcaagatcttctctttgtgtttgatgttctgcagtttcactacgatgtgtctaggcgtggatttccttttatttttcctgtttggtataatgtatggaagcatcccatatatttgaaataaaatgcattatgaaatacatgctcaccatagaaaatctggaaaaagaaagcatatcaatgtaatatctcctgatagatgagaaaataatcaaatagtataaaaaagattaaaaataaaaagcaacattccttacttcattcttctctatactagtcccactccgcagaatcccccacttttaaatgcttctgtttctttctccgtgttgtaataatatgctttatactgtttcttcattgaccaactagatagtacctgttgatttcttgctgtatgtcaggttctagcccatttatacttttcccttgcttccaagctcatacagcaaaatcaatttttaattcatttattggttactttagtaattttaagtagtaacttaaatatttcttgtctggttatatttcagtatattttgacttctgaaagatatgtatccttcaattcctttttttttttggaggtagagtctcacttttgtcacccaggctggagtgcagtggcgtaatcctggctcactgcaacctctgcctcctgggtttaagtgattctcctgcctcagcctccttagtagcttgggactacaggcacaccctgccacacctggaatttttaataaaatttttagtagagacagggtctcaccatcatgcccaggctggtctcaaactcctgagctcaggcagtctgcccaccttgtcctcccaaagtgctgggattacaggcataagccaccatgccaggcctctctttcaagtcttatattttctttcttgccgccacctacattctgtcctgcctccaccttctaaattgtcacctgttcttttatattgtcaaagctgatcaaatttacattttgttccctactttagttaagacttagtcgattgactctaagttgagaaacagtaagcatttacactgttaagactatttagtctgggcatggttggtggctcacacctgtaatcccagcactttaggaggctgaggtgggagatttgcttgagcctaggaatttgaggccagcgtgggcaacatagcgagaccctcatctatatatatattttaatgttttttaattagctgggtgtgatgatgtgcacctatagtcatggctactctggagaattgcttgagcccaggagttcgaggttacagtgagctgtgattgtgccagcctgggtgacagaccaagaccctgtctctaaaaataaaaaaaaaattttaaagactatataaatattacaaggccaaatttacattctgtttcttgtacagttttgtgtgggaactctctagagtttttttaatttttcccccttttttgtttcccttaggttcttcttttttcccttctttcattgcctacctgtactgtagcctaaaagtcttatcactctgtgctttgaaatctttgggtttcccactttttcttaggtaccttcctcctggagcctctctcctccttttctgacctcactgcttgctctaggcctgctcaaggccatcatcccgaggcgccctcctcccctgagtcggctctgcaattcctgaattccattttgtcttctcagtgcatttctccgttttgtaatcacgtcacaaagaaactccttaagaaagtatagaaggtaaattttctgagttcttggaaatctgaagctatccttgtacttgtttgatactttgactaggtacagaattataggttgaagtcattttcttcagaactttgaaggcatagtttcattatcttgaggcttcagtgttgatgctgagaacttggttgcccatcttattccattgtgtaatacctgggatttttttctccgggaacttttttttttctatgttcctggtgtctgaaatttcactgtggtatgtctagatgctagttaggtacattaggtacccttttaatttgaaaattcattctcttccgtgtgggaaatactcttgcattatttgttttaaaatttgctgtccttgttttcattgttctctggtggaaattctgttagttggatgataagcccttactttaatctgtcagttgtatattttttctctcttgatttttgacttgatcttgttggtctactcttgaatacttgcttgacttgatctttagtctccttactgaacattttaaaaatgtaggcaagcatattttttaatttccacaaactttttcttgttctatttttcatagtatcttactttgtggatacagaatcatctcaactgtctgaagatcctaattaaagggattttttttttcttttcaaggaattcactcttgtcttctaattaatggagtcagagtcagattttatgctttttttcttgctctttcgattatggaatttttttcaaaaacatctgcagatagtggttcctagtttaaggaaaggtagtgcagaggcttacctagaattgtgctgtgggctgagcttttctgcaggcaggtttagctttcaatgaagcagacaaggagctgcaattggccttgcagttgtagaggaatttcttgggggagcaggttggtatgcttacactcctactggttgtctattaaaaatattaaaattttgtcttttaaatgtctgtctctggcagtaccattcacaagccttcttctctgccttacatccttcttggtttttactcattgctgcaatctctcacagttggatggccctttgtttcatccaaattcaaggcttgatatatcatctctgcactgtgactctcacatttttatatctccagcctggaccttgccctgaattcctcatttctgtccaaccactttatatttcttcttggaggtgtaataaatcatttcaaacttgtccaaagctcaactatgaattttcctctcctgtctgttcttcctgtagtcttcctcattttagtttattggtgacttcacctttccagtttctgagacagaatcctgttgccattctttttttctctccttctcctttccttcctcttccctctctacctctgtctccctccttcccttgttccacctgtcagcctctacctccagatttatagaattcactaccgtttatcacttctgcctctaccacccatcaaagtcactgtctggccgggtgcggtggctcatgcctgtaatcccagcactttgggaggccgaggcgggtggatcatatgaggctaggagttcgagacctgcctggccggcatagtgaaaccccgtctctactaaaaatacaaatattagctgggcatgatggcacatgcctgtagtcccagctactcaggaggctgaggtacgagaattggttgaacctgggaggcggaggttacggtgagccgagatcatgccactgcactctagccttggtgacacagtgacactctgtctccaaaaaaaaaaaggcaaaaaaaagtcaccgtctgtgatttgccttggttacttgattattggaatagtgtgttcttacaaggtgtgcctgctttcaaacttgccttccttcagtccatcccacacagcagcagcagtgatcctttacactgtaaattagatcatgctactttgcagcttagaaccccccaggggctccctgtcacactgtaagtcacagtgttctgccttctcatcacccacctgcctccctctgctctggctccccgtgcttgctgctgctcctgcacactggcctgcttgtccttcaggacgttggaagagctgcgcgtctcagatgcttttgccctctcctgagaatgtttactttggatgttctcatatctcatccatgtgtcatctttgaggccttctctggccccatccccacactccctcttttctgaagctttatttttccccataacgtttgtcaccatcaaatacatattttatgtttttgtagtttaggtatttttatccgaacgtaggtctttatgttttaacgtgaattgttttcttttagcatgtatttttttgggggtcttgagagctacctccttccccgtctcaacagagtctgtcctttttgagcagggatttatgtgtttgttctgtatggctgttactgagtgcccagagcagtgtctggcatatagtagcaggagctcagtcagtgtttgttgtctgagtaaatgtcactcctgccttgcatctaacctgcagttttcacaggggctcatttgtggttttgcctgctgtgccttacagccagtatttgtccatatattttctattacccagagattgttgacatctcatctgctgcaccttgtaacccccatctctaaaccagtgatctccatcatatttttgacctgaaaatttttgtacagtagccatttttaagtatgtataccaatatatgtattttacttacgtacacatgctgtattgatatgaatattagaaaacataagaatagaaatctgccgggcttggtggctcacgcctgtaatcccagcaatttgagaggctgagacgggcagatcattaggtcaggagttcgagaccagcctggccaacatggtgaaccgccgtctctactaaaaatacaaaaattagccgggtgtggtgatgggtgcctgtaatcccagctacttgggaagctgaggcaggagaattgcttgaacctgggaggcggaggttgcagtgagccaagattgcgccactccactgtagcctgagcgacagggtgagactccatctcggaaaataaaataaaaaaagaacagaaacccaaagatcatagggtagagatgtagatattaagttctttaattcacttttatggactcttcagaaggagagattataattgtatatgcttgatacattgtgttggactggaagcactgtgaaagattcttagtcaaggggagattttacattcaaagaaaatggaaaatccccctgctttgctcggagggaagaactgcacttaaaagtttgatgtgtattggtgtcgtcttctaggcatttcttatatctgtgaacatgtgcaccctttgtatataaagtggaattacatgtttacttacgcacacacacacatgtacatataaagcaggaattatactacccagagttctctgtgacatttttgttccacttaatgtatcatgggagagtccttgagtgtggacctaggagccagactaccgaaggtgcagaccctgcagtttactagttgatttaacctttctgtaccctagtttcctaatctataaatgaagaataacggtagcatttacttcagagttcttggtaggagtaaatgttaaaatacataagctttctctgctgatgaatatttacactggagtcttaggaagggtccttgcttattttctattctaaagttgggctggacatagtgggccatatgggtgccatcagatgggctcttgtttctctgtgacccgttctgttagacctctttcctgcttttttccttgaggttgtttatctgtcctctagtgaaccagctggtttgcaggtggtgcttttctgagagtgtcttgctgttaacagttactatggatgtcatatgccagctggttctgttaaaaaaaagtctgtgaatccaaagccttgaattttgaacattattttctgtctggaattttgaagaactgattcataaagtggagaaatgaataaagatttttattttacaaattccagcacttagcattttctttattctgttactgtgacatctatttgggaaaccaaagactaccattctttataaggattcctttttttttttttttttttttttttttgagacagattctcactctgtcacccaggctgcagtgcagtggcgcagtctcactcaccgcagcctctgccttcccaggttcaggtgattctcatgcctcagcctcccgagtagctggaattacaggcatatgccaccacgcctggctaatttttgtatttttagtggagacagggttttgccatgttggccaggctggtcttgaactcctgacctcaagtgatccacctgccttggcctcccaaagtgctggaatgacaggtgtgggcctctgtgccaggccaggattcttcttttaagagactatagtgagcagcatctaccaacttgcatccttgtatgttgcatatcttatttgtttgcttggggagtaaaccaaagtaaaaacgtcctttgtcaaattaaggaccttacaagattttctgtgttaatggattggaagtctttactattctttttttttttttttgagatggagtctccctctgtcgcctaggctggagtgcagtggcacgatctctgcttattcagtctctgcctcccgggttcaagcgattctcctgcctcagcctcctgagtagctgggataacaggcgtgcgccaccacacctggctgatttttgtatttttagcagagacgggatttcgccacattggtcaggctggtctcgaactcctgacctcataatccacccaccttggcctcccaaaatgctgggattacaggcatgagtcaccacgcccagcctagatgtctttactattcttaagatggcagtagtccccaagttgatctatggattcaactcaatccctgtttaaaccccaaattgcttttttttgtagaaatcggcaggctgatcctaaaattcatatggaaataaaaagggactgagaatagccaaaactattgaaaaagagtaacgttggcaaggttatgttgcttgatttcaaaacttactacaaagctagagtaatgaagactgtgtggtactggcataaggatgaccatacagacccgtggaccggaattgagaatccagaaataaatgcatactttcacaacccatcaatttttggcagcggtgttaagacagtttattggcaaaagaataggtttttccacaggtgatgctgggacaactgaatatccacatgaaaagaatgaagttggaaccttatcttatgtcataaacaaaaataactcaaaatggatcaaaaacctaaacttcaaaactcttagggaaaaaaatagatatgtcttggattccagaatgatttcttaaatatgacaccaaaagcacaagcaaccaaaggaaaaaagataactcggacttcatcaaaatttagtatttttgtgtttcaaaagatactatcaaaaaaaaaaaagacaacaaaatgggagagaatatttaagaaacacctgtctaataatggtctagtattaagccaaggctgagttcttatttccccatccttaagtttacacgatactatattagtgaagttgaattctgtcattaccacatgtatcttgaaagaagtttgtgtggatcacgggtccagttactttctccgccctttccctccagaggatttgtcactctcaataatgttatatactaatttcaaggggaaatacaactcaaaacaaatcagaaatctgaagcttaaaaatgttatggtttagatgatgaaaagggaaaagtacatttaattcatatcatatttagatgtaaagcacttaatgttatattgcttaacctataaagtagcgcttcagtgctctcatcatatgaagtaaataatagaaaattctttgtgtgacacatgtctgttttcagccaatcagaaaccaggattattttgtatgtaataatagggtttactggaagaggagctatacagatggtacttagaggatgtagggccctacgtattagggcttcttagttgtagcgaagagcaattggtctggtacgtttagctttttcacatttagttttgaattctgactctagaaatgtacaaccccatcttttgaattacaggttttaagatgttatttgctcttaatacgtcttaaggtaacagccttgatcactgcttttactttcgatgaaataacttaatgagctgtgaagaaaaaattatcagattttaagggagagaattttatgaaaatgtctttgaggttcctgtcacctttatgagaatgtcttcaaagtttccatcaccacctctaccaatttttcttccaccggagccagtggacttaggttccataacaagctcctcttgttcactgaatgagctagacaatatttcccaccttttaaggaaaatatcagctgatatcaatgaaattaaaggaatgaaagcagctattttgacagtggaagcaaatctttttgatctaaatgttagagtgtccaagaatgaagcaaaaatttcatctttggaggttaaaatgaatgaatattcaacaacatatgaatgcaacagacagtttgaagatcaagaagaagatactgaatcacagtcaagaactactgatgtaaaaataatcggcttccttagaaacgttgagaaaggtaaactcttaatatatgatatgttctaggtacccatcctttgatctgtatctttccacgtatgttgactgtagctctgatgtggagggagcaagttacagagaacttgaatttttcatggacctttaatgacaaatttggattctgcttgatttagcttagcaatctagaattgatcagaattccatcctctttaatggagctctctaaaacgatgttttgaaaagacagatgaacctagagcaatgaagcaaaacttgaaatgtggaagtgtggtctttcatgtgtcttgtgaaattattttaaaatgtctcattctttcatcatgtactgttgatgtgaaggagacctgttgcagtatttggatggaaagagcattcttcctgtaacttttcacctcagttttccaagcttcccacaggaatgcaacttgacctaagtgtcatcttcgttacagttcctcagaatgtgtgtttttttatggtaataattctggaaggaattgacttttttgggacgcaccagtaaaatttcatataacttatgttttaaaggaaactaactgatacaatttcaaatcgagtataggttttaaaatttaaaaacaccttttaatgaaatgtggtgcttggtgggagatggcccacttaacatctttgcactgagtaagcaaagcctgtccttgtgaagccacctgtaatggatatacccaaaatcagcatgtgggcatcttagtaagatttcagtatttgcaaccctatcagttacatccctttgtacactgtagtgcagtaccttataatgagcaagtgagtgcctgatgtctgctaagcgctgtgggggctacagaaaagtgtgacattctcccatcctcaaggagcttaacatcaaatcgaggatggaaaaaaatcagttctttgtccctattttgtgcagtcagactgctgggcatattattgttaggaatagtgaacctaataggaattaatgttaggagcctattttagaagaaataagtagttgaacatcttttcttgtggaagaggcaaagaattattatcatgctttgctaacatagggtgtggattgtagagctgagtgtcttattgttttctttgcatgcatcgaagcccagagtttgtcttttaggaactcttgtttagatgatgagagtgttttgttttgctatttcgattatcttcaaaggtcatgagtgagtcgtgatggtaagagctcaggtgatggagggaggtgcttgccatgcttattgtgcagttggctgtgatgcgagctgctgggccacaaggtgccttttcctggattttccacccgtttgccacctttactttccccgcagaattcaaattcaggaaaactgatgtcctcatagagggagaaccaggagtgttttaaattggcatttgtggtttaaccctgagtacagccttttttgtcttacaggatatgtctttggtctataaatactattaaattgaattgttgaagctttaagttacttttaagacttcaagttaagaacccagaaggattgatttttgggaaccacatgctggtattgtctgtgttgtaagcttagtgaagttttaaaatttatattctaggaactcaacagaggcaattattatcccgactgcaaatcgacccagtaatggcagaaactctgcagatgagtcaaggttggtaatgtttcaagttgtactgtaatccagccatttcagttgccatttccatttcttacaccccatttaacgtatctcggatctcttagatcctgccctaagatgttatatttagatctgtgaaaatattttagggccaggagataagatctgcatttctttcatgttatatagtgttataattttttgcctcattggaaaactttgttcctttcacaccattccaagtgtgtccctagcactgtcggctgtcactctcctgctgtcaggagtgacctgcgtttctgatttaccctcccactctacccagcttttgtcattgccatgagtggcttttgtatcctgtttttcacctggttagccttatcctcttgtacttcattttggagtcttatcaccagggccacacctggaacttgttgttctagtgttctagagccactctagtttgcctgtctcctttcctctccccacagacacacatgccaggggctactccaggactggagctgacgccttcatttttattatctctgtcctcagtgcccagcccctgccagatgcatgttcaatgtcttaaaaatgactgcaggataaacacaggcaaccatgagagacccggaatcatctcagtccttctgtttcccctaagtctgtcttttgtgggaagctctggtccctagacccctctcagtcaggactccacagtcagtcactctgttccccgaccctcccccagctttccagctcagaaagtgtgcttttcctccctaagggtcagcctccaccagaggccagatcccactgggttggtgagccactggcatgtcacccactcctccaacttcattctctgcctcctgtcttctctctgtagaggtgttcagacattctctgcccgtgattttgctctctcatctcccagcagtccgtcctgcttcctccacaggagtatttgaaaaggttgacagccgagatctgtgtgtgggatccacttcatcagctcttgtgcatgttttctcttctgcctccttcagcttttcattgtacccatggtgcacgcagtttgaaatagcaagtagttctgtgaggcttatgaatgactgcagtccttagctcctatcacattttttattctaagatccctttgtttctgcatattctattaattttctaaaaacatactgattttgtgtacacaatactctttgttatttctctgtggtctgaaaggtggttttgacatttttcccctccctgcttcgtcttgttttctctaagtggtctgttttggctgtcttttatgctggaggttcccctctgatgtctggggatcctaggtggtcttacatttaagagtggagcactcagaaggtcactggtattctgggttcatgagttggggcatggggcactttgactttctgtttgaaactagaccctgtggtggaaagtgatttgtcctgcctgtctggtttgtgggcaccctgatgtcactgccttcaagactttcctctcaggctggtcagcttctccaaaacaaagtttttcaagtaatagcctggtagtcagagttctgcgagcttaagtggggaaagaaggctgggggaggcacctcaccattaattattatgtaatgtttatttaaccctcccccaaccattgtcagtccagtacttctttcatcatggctggtgtctcttggtccagggactctgttcttatcctctgaagagtctaaagctccactttctccaagggagaatgcatgcagtgggtaaagatttatcaggaaatctaattgcctttaaaaatttttaacagtgtaccttcaggtgattttgtcgtagcatctttctggcagagaccctaatgcttcatccataggcctctccgaagattatctacaggaaagcacatcaccagtcatcccaggtgtcttcagtgtagaggtcgggattggtgtggcaagcatcaaaaccaagaaaacagtggccaggtgcagtggctcacgcccataatcccagcacttggggaagccaaggcaggcagatcacttcaggtcaggagttccagaccagcctggccaacatggcgaaacccaatctctactaaaaaatacaaaaattagccaggcgtggtggtgcacatctgtaatcccagctactaaggaggctgaggcaggagccttgcttgaacccaggaggcggaggttgcagtgagctgagctcgcaccactgcactccagcctgggtgacagagcaagactgtctcaaacaaagaaaacagatacatggaattagagttgaagaagaactaactgcttcttggacacatctaatacacctcttttttgcctgccatttcttccatttcttcctaaggtccttttactgccagttcctgagcctttggagaatcttgtggtctgaattggattgcttcattattgccttagaattcagcttttacagatcccctgagttcttaatcatctgttttccactttgaaaatttctttttacacttattttctttgtgagtttatgctttcaaaacaaaaacaaaacccttattgacatttctgtgggctttcaggagggaacaaaaagtaaatgcatggggtcagcctgtggtctctactcagaagatgttacttactcccccgtctgtctggtctccatgtgacctgggctgctaacgttccgcttgcagagaggtgtgcgggagggaccggtgcacgctttcctcaaccctggagcatgttacacttgggttcccatactttctccaagctttgacctttcggcttccagttcactctgtctttattcttctcattccctttcattctcatgtgtcagcgcatctcctccattcctcctcaaaaggttagctttgctctctcccaccttcagcattattttcatctcttctgtgttcacccaacctatgaactggtagaactccttcgtctcagaaagtgcagagtggtgggaaggagtgaagcagcccctgggccactgttgggacccacctttgacagttgtgagacctcggtgaatcatttaataacttggagctgcaaacagtcatctgtaacatgggaggaaaccgactttgtaggctttgagtgaggattcagtgagagacggccaccctgaatatgttaaacacttctgtcaccttcggttttgactcagcatcttatttctgtccccccacctacaggtcaaatctgaattttctacttcctcttaaacatgggagagtcccacaaagactttaaatctaacatggaaatgtatctttgccccttttaactttgctctttttcttttgctaagtttctcatcccagctttctcttccgcctgtctccctttaccatctgtactgcccttgctggggaaggcgggcacgccccttcccaggatggagcatgtcttctcttcctgtcaggtgtgtgagaccaggacagacagcagagaatcttttcattcagagcctcaccctctgtcccgggcaacagcaggtcgagaactctggttcttccttaacactgtttttctaaaaaccagtttgatcaggccacttccttccttaggaacctctcttgatttcttttctcttttttttttttttggtttgagatggagtctccctctgtcactcgtgctggagtgcagtggcacaatcctgctcattgcagccttgacctcctgggcccaagcacttctcccacctcagcctcccaagtagctgggactgcgggcatgtgctcccacgcctggctaattttatttatttatttattttctggttgatgggaggtctcactatgttgcctaggccggtctcaaactcctgggcttatggaatccttgtgccttggcctcccagaatgttgggattacagacatgaaccgccacaccaggccacttgatttcttactaattatagaccagaatcgagagtcactgagacatagaagaacctttattatatgtgtcagccttccttggtatgtactgctgagcccaccacacacacccttccagccattccacattctaacctttctcagatgccttcggccttgtgaaagcccctttccttctacgtgcgttttcctctgcctgaagtgctgtgttcgtttctccgagtctctctccttgtttattcctgcttgttcctttactgctgacttcagatgttcctccttgctaagcttttcgttggttcttggctggagtgggctgttctgtattctcagcaccttgttcacatcccttttgggtcatgctattctgaaattgtatatgtgtctgtttttctttttttctttgtgtatctagctcagttctcttagttgttcagtaaatactcagtgaatgaacataaatgaataccctgtaaattttggtctctaagctttaaaagaagtgtattaacttcagtccgttgatggcgtattgataggtcagccattctgggttgtaggtcttggcatattttataaaatagtagatgatgtgagcttatggttatttgcattaaaggccagtgtttttcttgatacatatgtttaagtgtccattcacctttcagttaccttttaaagtagtcctcggtttataaccaactggaaattataccacttgaattctttttatcaggacatgattctaagtggtactgtgcgaagtgaacaaaccagattttggaaaagtggttcagcagtctgtgtattctaattatagggagcattaggactcaaattctccaggtttttagaaaagatttttgtactttaagggtatattgttaatatctgttgagatgcctcacctgagaacctttctctgctgtggttagggagtgttaatcagaatcacttgtgccgtgccctacgcgagaaggactccttgagttctttgaaaacatgtttggaatagaattatagccctgttttcctgagtggaaccagttgtgattttcctttgaaataatttgaatatataaaagattgacattcttctcacatatataatgttgggaatgtaaggtatattcaaaagtaaacatttgtggccaatttttttggctcagattactatgacatggaatccatggtccatgcagacacaagatcatttattctgaagaagccaaagctgtctgaggaagtagtagtggcaccaaaccaagagtcggggatgaagactgcagattcccttcgggtactttcaggacaccttatgcagacacggtagatggtttctttttcttgtgtagttaatttgtgtgattagatagtaaaggttaaccattcgtttgcagcttccctcctccccgccctaaccgctagcgtagagtgctttcattgattcagtagctagcccatgaatagttagccaaattcagttttcaagaattccagttcatctttcttgttcagaaatccattaacctacaaattacaactcagtgtatgatttaactctattaaagattcttttctttatgcaaattcaggaaatgcaagtttaaaagccagctgaccataatcaggtcagctctaaagagagttggcagatcaggtttgggtgatttttcccttagaaaattgactgtttctataaaagaagaaacatacagataattagcataaatgctgctggcccttgtgttctgagcattgatgctaattttttggtttgtttccatgttgaccctatgaagatcgaatgggtgatggggtcaggcttgaggggagattgtccttagtaagtacaggctggagggtcactggtgatgccactgtgactgttcatggccatcgtgtgttagcagagaacccaccagtgctgcacctggtagccctacctagtctttttttattgaaccaaacgcaaagccaagggagtgatagttctgctgaagagcactttagggggctcagcgttttgtgtttgtttccctaattctatggtattttttatctgtctggcagagatcttgtacaaccagataaacctgcaagtcccaagtttatagtgacgctggatggtgtccccagccccccaggatacatgtcagatcaagaggaggacatgtgctttgaaggaatgaaacccgtaaaccaaactgcagcctcaaacaagggactcagaggtctcctccacccacagcagttgcacttgctgagcaggcagcttgaggacccaaatggtagcttttctaacggtgtgttgagagctcagattttcagggtgctgtcattgtgaagggaatctttgacttgtttctctaccttgaatgaatattggttaaaggccttgcttttatttatattcagtaatggccttttttcttctttcagacaaacccaccaagtacatttcagactctttttcctgtgtctttttcataggtgggctgttactccagtttgaaaacggagttcagccatggaacctgagagacctcttccgcttatgctggctaaaggatgaaccaccattcttgttgccttctttacctttgtattttcttcagaaactgtactgccactttgcccttttatcagcaatagtctcttgcaattaacttgagagaaaaatttagatttgatgctatttctacctcagtgaaatttctttgaaaggagtttctcacctaatctatcaagatcttggaactgtttaaattaatgttgaagagtaatatttagcagaactcagatgaactcatttcagatagcaccatagtttttggcaggtgacagtttcttatcaccgtttctttcactgggtatcagtggtagctgcaacgccactgatcatttccattcatgatagagaatggtaattatgttccttatatcttctaaaatatttagaagcacctcttcattggcaggagggataattactcaatcttaaaagcgtacagattcaaaggaaaaacagtaatggattttgaaacatttccttgagtaatcctcttcttggaagagatatgaaaatgtattgaatacctttctcgatcattaaaaatagaatagacttcagagggaaatcatatgttagtggagcaataacacttagctttattttaattggttgcgtttcctactgtgaatcaatgacgtagtgtcgtggttttgattagtggagggagttgaaaatctgaccctatcaacaggaagaaaaacttaaaaaatagtaaaagctgcagtaggcagtcccgatttattgactctgtatgttttgtctaaagagaagactccagtgttttcactactcttgattttcaatttggtaccttaattttttggtctattaggatctggtttcatttaaatgtaggtgtccatatgaggctttatggggtatacatgtagcagcagtgacaccataaataatatgttagtaaaaattcttgccagtgctgtggccattgtgctgacagccatgatgagtggtgagcctcctttcccattgctttgactggggactcagtgtttccctgctgctcaaggatgaagctttgtaagattagcataggggtgtggctggagagactcctgcagaacagttctcaggagtctctagtctctgcaccacttcccctgtgagcagggagtttgaaactgcaattgcttctggttggttttatgttgggttgtttcaaggatgctaccaacaacaacatctgttttaacctgctgtcttttcactcactgtcatatggcagcacagattttatagcttgctttctttgttttttttttttttgagatagagtctctctgtcccccaggctggagtgcaatggagccatctcagctcactgcaacttctgccttccaggttgaaagccattcttctgcctcagtctcccaagtagctgggattacaggcatgcaccatcacacctggctaattttgtagtttaagtagagacggggttttaccatgttggtcaggctaatctccaactcctgacctcaagtgatccaccaacctcggcctcccaaagttctgggattacaggtgtgagccaccgtgcctggcctatagctttcaataaaaggtgaatttgcctcttaaaatttgaacagaaagttttaatagtttacaaagtcggtgtcagccagtgaagactaggggcatgaccttcgtatgacttaatgtttttaaaagaaagataaagtttctttgtaaggtattattgtaataatcacatttctttgtaaagtattatattgttcctgagtatctagctactttgctttccagctaggcttctcttgggtattctcttaatcttttatttgtactgggttcttgtgtatatattatagtctgctgtgtgtaatttattataggaaaagggtaagacacatttactttgcggggatgacacaaaaaacctgtaaaaattagagaaacttccagtcatctcacattttctttggaaccgattattcttgtatcttagaactaaaatgacttatactgttttgtttttagaaagggtatccctcctgttgcccaggctggagtgcattggcacagtcatggctcactgcagcctccacctcccaggctcaagtgattctcccacctcagcctcctgagtagttggttactacaggtgcacaccaccatgcctggctaattttttgtattttttgtagagatggggtttcaccatgttgcccaggctggtctgaaactcctgagctcaagtgatctgcccgcctcggcctcccaaagtgctggggttacaggcatgagccaccacatcctatttaaagcttaaataggacttttactatttttaaagtagcatagaaaactgtttgtatcaggcatagtcataattgctctttgatgctgctcctatctgggctgcatgactacatttgtgtgccttgttctcctgtagtgaggacagaatgtgggtcactggaacagtaagtactcatagaactagctgctgctgctattacgactggttgcctgttttgcattttttccgtttaatcatcagactctaaggaagacattattttctctttgtatagatgaggaaacagaattccaaaaagttagctaacatttgcacagagtgtctggctgagcaactaagtggcagagtcagattttaactgacctctggcaagaggactagaggaatacagttgaagtgatacttgctttcatgaacatgaatgtgaaccataatacataatacccatgatgctattttgtggggagtttaaggtgtctcagtccagaaattagcagctgattattgcctgtagctgtaattttacttattcagtgttatttaataaattgccagcattacaatttcgatgaaggcagatttttggcttactgaaacaggataaaaatctggcaacaggggtcccactttgccctgtcatagtaatcgaagctgtgattggatgtggcacagggagtggagtggatgggtgtgcacttgctttccaggctgctgctccccgtctgtcccttattgcatttatcatcttcagcccagtcagtcttgctgttaggggaactgcccagtctctgtaagtgatggcatttgtgaccccattgtaggtaaaaatgttttcccctttttagacattgctggctgagcgcggtggctcatgcctataatcccagcactttgggaggccgaggtgggtggatcgcttaagtcctggagttcaagaccagcctgggcaacgtggggaaaccctgtagccaggcgtggtggcacgtgctacttggtaggggctgaggtgggagtatcacttgagcctgggaggcagaggttgcagtgagccgagattacaccactggcacaccactgtactccatcctgggtgacagagcaggaccctgtcgtaaaaaaaaaaaaaaaaaaaaaaagtaaaagacattgctgagtttcgcacctggacttacagctcagcaggtgggaatccttttgtatttgggccactcatcatcttgctggcgtgtgaggattcacatctccttatcaccttacctgttttcagtttttatttaattttattagttccccacttgacgtccttctctatttttaattcagctatgaattagtattgagaattagaatttttggtgaaaaatttggccgtagttgcagagtcactgtcctctttccttttcacagtgagaactgttgtcttcttcctggcaaccttttataggattctatggccagtgttaatcccataatttgagctcacttattttatatgactgtacatttaacagaagattctaagacaggtttgagggaaatatgttaaaggtgctgtgtactgaattgatcataatgaatgaaatacttttatttcctttccctttgtagctgagatgagtgaactgagtgtggcacagaaaccagaaaaacttttggagcgctgcaagtactggcctgcttgtaaaaatggggatgagtgtgcctaccatcaccccatctcaccctgcaagtgagtaccatccccccatctcaccctgcaagtgagtaccatccccccatctcaccctgcaagtaccatcccccatctcacctggcaagtaccatcccatctcacccagcaagtaccatcccccacatctcaaccctcaagtgagtaccatcccatctcaccctgcaagtaccatcccatttcaccctgcaagtaccatcccccatctcaccctgcaagtaccatctccccatctcaccctgtaactaccatcccatctcaccctgcaagtgagtaccatccctgcatttcaccctgcaagtaccatctcatctcaccctgcaagtaccaccccctcatctcaccctgcaagtatcatcccccatctagccctgtaagtgcgagtaccatcccccatcttaccctgcaagtaccatcacccacttcaccctgcaagtaccatcccccacctcagcctgcaagtaccatcccccacctcagcctgcaagtaccatcccctatctcaccctgcaagtaccatccccatctcaccctgcaagtatcatcccccacctcaccctgcaagtaccatcccccatctcaccctgcaattgagtaccatcccccatctcaccctgcaagtaccatcccccatctcaccctgcaagtgagtaccatcccccatctcaccttgcaagtaccatcccccatctcaccctgcaagtaccatcccccatctcaccctgcaagtatcatctcaccctgcaagtgagtaccatccccccatctcatcctgcaagtaccatcccccatctcaccctgcaagtaccatcccccatctcaccctgcaagtaccatcccccatcttaccctgcaagtgaataccatccccatctcaccctgcaagtgaataccatccccatctcaccctgcaagtgaataccatcccccatctcaccctgcaagtgaataccatccccatctcatcctgcaagtgaataccatccccatctcaccctgcaagtcatagccagctgattttggctttcagtttagtgtctgtatcttacaccttattttgtttttgtttttctgtggacaagtttttagttttataactaaatggagtgacaattaccatggccctctccagagtagcgtatttcttgttcatgtatgtttgttgagaggcaagggtgggggggctttgtttgtgcctcggacctgtgagatactgaaatacctggggttccttaagaattctgtacgtttaagcagatgggtatatggtaactgccccagtttgtatgcattttggccacacgcagtatacacagattttgaggagttgagggaaaagttagttatgggtaatgaaaacattttggacttgggttaaatttttccttacaagctggctggctcaatgtaatgagctttatgagatggctttttggggcttcttttttttgccgggggtaggtcctatggatggaatcttcatttttaattcttttaaggaaatgatgtgggaataatacagctgtacatataaggagagtatgggatgagtctttttgtatcacaaagccttgcatagaggatgtgtttattgtattaatgagttcactgcataaaatatataccttttttattaagtggtgtgatttttatcacaaaagcttgtctttcttggtggcttggcttgagttaaaagcctgtgtttgtgttatcccaagctttggaataaatgattgtgtcctattttgatatatggtcttattttaaaatattctttttgttgctgttttttttgcatttctcaaaacaagtagtgatggggagtgtaaagagcccttatacacagaactaataatgcattgagaagattgaatatgaaatatgctttttttttgttttgtagagccttccccaattgtaaatttgctgaaaaatgtttgtttgttcacccaaattgtaaatatgatgcaaagtgtactaaaccagattgtcccttcactcatgtgagtagaagaattccagtactgtctccaaaaccaggtgagtgagtgactgtgctactacatttgggtaaaaaatataaaatggcattttgtgactgtaaatggaattgaacaaacaaaagatggtttcagaaataattttggcaggatcagttaatccaaccagtctttaaagagcaagtgtgcctatctgtagtattccgaagtattttgactagtgaatatataaaccttaccattctaatttaaaaatggttttcactttcaaaaaaaacatcagtagactgcattaaaaatgggttttccaaacagattggagatcagtcctggtttttattttgttagcagttgcaccaccagcaccaccttccagtagtcagctctgccgttacttccctgcttgtaagaagatggaatgtcccttctatcatccaaaagtaagaacttctattttctcaaatcaatttagtgacaacatctcaatttcctcatttaacttcttttttgtcagagttactacattggtgcaaaagtaattgcgatttttgccagtaaaactattaagttgttcctcgtcactgaacctccatctggccccttaggccaagtggtctgaaactgttcaatgttagtatcccaagcactcagtggggggaagcatatctttgctagtcacattttccattattccctgcatttaagtatatggatgggttttagcgggggctggggggcagtttgaacctaatgtcagaactgagatgaagaaatccagtaggtactgcttaaaaccatccaaacttgtactgatgatggttgatgaatctccagatgtttagttggtcaaaatgaattatctccttcttgccccggtagcttgaggaccatatgaaggccttcacttgcccccatctgtaactgggcgtagatgagggtactcagtgaagagtgtaagggataattagaagtttttgtggtatgctaaactaccttttgaaattgtacttgctgtgattctttgactagaattttgtgtctcaaggttaagtccatttttcaaggcttcactagtattaaaatggtccttatagatggaatctcttactctgttaatggttagggtgggctggttattgtctcctaagttgtatgttggccaggtgaggtgggtcaggcctgctatcctagtactttgggaggtagaggcagaagtggaaggatcgtttgagcccgggagtttgaaaccagcctaggcaacatttaagagaccccatctcttaaaaaaaaaaaaaacaggcttggtagcacacgcctgtagtcccagctactcgggagactgaggcaagaggtcatgccacttcactccagcctgggtgacagagtgagaccctgtctcaaataataaaataatgtgtttacttatattagccttgtggatattgttgaagctctgttatctctattcagcattgtaggtttaacactcaatgtacaagaccggactgcacattctaccatcccaccattaatgtcccaccacgacatgccttgaaatggattcgacctcaaaccaggtaaacattcaaattcgtttttctcatgtcagttcaaattcttttttctaatttgcagtttctaaatttataagcacacaaaattggaaactagactgttactttgaatttttttctttgctgtttaattatagaaggctcctttggcaaaataatttactacatgggctaaattttacattatccagtggttacttttttaacctagattatcttgctctgttgcccaggttggagtgcagtcacactatcatagctcactgcagcctcaaacccctgggttcaatccatcctcccacctgtagctgagactacaagcgtgtgcctctatacctggctaattttttttattttaagtagagatggggtcttgaactcctgagctgaagcgatatccttccaccgtggccttccaaagtaccaggattacaggcatgagccaccacacccagccagattttaacttctcattatatactacgcaaacatatactaaggccagcaggagtatatatatgtgtactgtacttgaatttcacatccattttcttcgacattagcaactgggagatactgaaaggaagtttcaaaatattttagtgtggccagaaaatttaattacatatggtattatcttttatctacctgacataattgaattatttttaaaaatctgccatttatattgtaatcttatgaccaaatatttattgcttaaaactagtcaactttttaaactgagatatatggtatatatggatacaaagcagataattaaaacaatttttggttctgttcattcagcgaatagcacccagtcctgcctggcagaagatcatgcagtttggaagttttcatgtactgatgaaagatactctacagaacttgtcaaatctttgaaacttggaatatattgctttcataatatgaagttttattgcctatctatctgaagtgtctaatttttcaagtttgtaagtttattatgtggttttaacattgggtgtttttgttttgtttttactatgaaaagacagcttaaggaagagctaaattctgttaaaatatttggggcatgtttgtgcactgctgttgtgaggatcagcatatgaaattgacatcatggttagtcatggtactgcagcttagggggctacacggttgctgtgtgagtggagagatgcagtgaggcagttgtcattattctaaaaattgtactactttcacttttcccaaagattatataatgttcataatccaccatgaaaacagcattggccaaaggtactgaggctgcttaaaatattcaattctgctttttaatttttaagtgaatttagtttgaaaagcatgattatacaggcctctcaggctgagtgctactttggtaaagttcccagttttcctgccttctgtgacaggatgaatgaggtgggtatggacagtggaggcagctggaatggcaag

SEQ ID NO: 15891 - DNA, 48521 bp, Homo sapiens
cggagcgtggctgcggctgaagtagccgccgggaaatggaaggacaggcgcaggcccggctggagccaccaccgcggcgcacggcgccgctttggatccgctgcgggaggtgggcgccgcggggctggggctggagctggagtggggtgcggggtggggggcggtgcaggcgaggctcctcccagcccccgcccgggggatccgaggtgcgcgcaccagcaaagtggcctcagccgctgcagagtccggtcttgttttcctagagccgcctttctcacatgcacgtttgctctttttctctcagagtgccattaaggggaaattacaagaattaggagcttatgttggtaagtgtttttttggttgttagtcttacagaatttagagtttgcagctaatagaattttagtgaatgcgtatttctcaccgtactttggacattgggagagactcccttctaccttcttcaaatcttatactccctggttacttctttatcatctttttgcaaccttgttttttttctcccaaacctccttctgttatggtgttttgaaatttagtttcctccgttaaggctctgtttgaccgaattttattttatgtttttcctattctctctctctctcattttaaattctagggacgggtctcgctacgttgcccaggctggtcttaactcctgggctcaagcaattatctgaccttagcctccctaggtgctgggagtgcggggattactggtgtgagccaccatgcctgtttaaagtttcctattcttgttactttcctcttgacatttgtttttagaactctgatgttggatgtgaatgtttgatgctttctggcatttgcttctgtaatggttcagtgagttttattttccgatctctttatgttttccctctctctctgaaacagtaaggctttttccgtctctttattcttttataatttgagtgtttactctgggtcaggtactgtgcttaactattgtatatgtattaactcaggataatccctacgagaatcctggaaggtaagtggcagtatctttgactgtgtaaacaaggaaactgaggctttgcctacttgagcaaggttttatggtttgcccccaaagctggtgcctcctataaaaataatagctaccactaatgacagtggttctcaaagtgtgggagactccaagggcctctgaagtcaaaactgttttcatattaatactaagatggtatttgttatttttcactgtggtggtggtgtttggattgtgtaaaactaatggttgataaaacttgtcagcatagtaacaccataatgaaatcatattcaaatcactccccccttgtagtttttttctttttgagccaattacacttaaaatgtcattgatgaagatgtgaagtccagggtttacaaaatattttttatcttcttagtattcagtgcgaggaaatagaaatgctcataaaacatttttattgtatactgaaatacgattgttctgaggaaaatcattttagttgagaactaagctagccacctctttcagggaacatcatttttaacttcaaagtactgacaaactggttacatacactaggatatttggcagatatttacttgaaagtgagcaaagaaaagaatccatagtctttgttgccaatcacatgtgagctttcaaatgaaaattagaattttggaaaatctgagcctgcctccatgaatttcacagcttcccagtacttaaaaaatttctgattaaataaatggtgatttaaaaaaaatttgttattattattattttttttgagatggaatttcactcgttgcccaggctggagtgcagtggcgtgatcttggctcactgcaagctctgcctcccgggttcaagcgattcttttgcctcagcctcccgagtagctgggattacaggcatctgccactacacccagctaattttttgtatttttagtagagacagggtttcaccatgttggccaggctggtctcaaactcctgaccttgtgattcgcgtgcctcagcctcccaaagtgctgggattacaggtgtcagccactgcatccggccaactcaatggcgatattaaaaaataattattttatactgcataatgaaatatatcaacgtgtcagtggtttttgtagctaagtgaaccaatcttttctaaataaccaatgcataatattacaaaattatgcagtggattaaagatttatttaaactctggggtgggtcagtggatttttgtgcaacagttcaaaaaggtcattgacgtatttgacattccacgttgctttaacatttaataagctaccacttgtttagttttggtgtagtgtcacagaagaatatccaccttatctgaaaagactatcagaatactcctttttcaactgcatatctgtgagaccagattttttcatattcttcagtcataagcacatagaacaagatatataaaaatatgaaacaaggccagtctttgcagtaaatttttctttttcttttttttgagatggggtctcactctgtggttcgggctggagtgcagtggtgcaatcttggctcactgcaacctccgcctcccaggttcaagcaattctcctgcctcagcttcccgagtagctgggattacaggcacctgccaccaccccgccccccccccccggctaatttttgtgtttttagtggagacggtgtttcaccatgttggccaggctgatctcgaactcctgaccttaggtgatccacttgtctcagcctcccagagtgctgggattacaggtgtgagccactgtgccttgcctaaatttttttttggaaaatttaataatgttacttgtgttaatataattggatttgtgattaacatgtgatggatttattttttaatgaattaataaatactttttaattaaaaatgatcagttctaattttgaacaccataaataatagaacctgcataaaccaaagaaggggcccaagaccaaacagtttgagaattggtaatttatggagtacttaccaccatttgctgggcactttcataaacgatttgttgtcaggattgttggaagactaacagatgagagaattgaggctcagagaaaataaagctgaaccaagatttatttattcttttattctttcaacacttgaactgcattttttatagttttctttgaaacaaaaaaagtacttctgaaatgaacctttctgcctgcatagaaatattacaagtatttaaggtattaaagaaatttgtcacagcatggtggttcacgcctgtaatcacagcactttgggaggccgaggtgggtggatcacttgaggtcaggagttcgagaccagcctagtcaacatgctgaaacctggtgtctactaaaaatacaaacattagctgggtgtggtggcaggtgcctgtaatcccagctactcgggaggctgaggcaggagaatcgcttgaacccaggaagcagagcttgcagtgagccgagattgtgccactacactccaacctgggagacagagcaagactctgtcgtaaaagaaaaaaaaaaaaaagagaactggaatggagttttgagggtcagagattagagttcctgataacagcttttgcttccttatcttcttagtgaggtttttgtttttttgttcttttaaatcctagacctcactctcataatcactgtaggattaccactaggagggtgttttttggcttcttttatttattttatttatttatttttttttgagacagagtcttgctctgttgcccaggctggagtgcagtggcaggatctgagcgcactgcaagctccgcctcctgggttcacaccattctcctgcctcggcctcccgagtagctgagactataggcgctcaccaccacacccggctaattttttgtatttttagtagagacagggtttcactgtgttagccaggatggtctcaatctcctaaccttgtgatctgcccaccttggcctcccaaagtgctgggattacaggcatgagccaccgcgcctggccttttttcttttttttttttttttatcctagacctcacccttataatcattgtaggattaccactgtgagggtaaaaccgtgcattgagttgacattatttaatgttaaaattgatttttttaaatgatgtggagcttttgggtctatttgtttattcgatgttgctacaagtttgttactgtgagtaattgaaacctgcctttagcaagggtaaagatgttcacttgagaaatgagtgttattttgaaactttgcaaattaaaactaaacaaaactcaattctttttcttggggaatgttcaaatatttcccataagcttctttgaaattaataagcattattaaaaagattcaaggaagtgaatgcatgctcaagtttgaccctataattcagaatgtttagttttgtaagtatcaattattcttaatttccattcttctagtatttgaaatacctgtggaatgaagagaaaaaaattaaagctaagccatcttgtccaatgtaattccagtagagctctgcgactctaaagcttagagctacatctatattttcaagcacatcaactttaagaagaaagttttgaggaaacaaagttttgatctacctttccttttaaatagatgaagaacttcctgattacattatggtgatggtggccaacaagaaaagtcaggaccaaatgacagaggatctgtccctgtttctagggaacaacacaattcgattcaccgtatggtatgtttctgaatttttgtgcctcagaccaaagtttggcacaagcctgagttgatattctgtccaaagagaggttcttgacacttgagttaggtttactttggagaggcagtttgtgagtgatgagagcacagcctctgtattagtccattttcacagtgctatgaagaaatacccgagactgggtaatttctaaaagaaagaggtttaattgactcagagttccacatggctggggaggccccaggaaggggaagcaagcaccttcttcacaagtcgacaggaaagagaagagtgaaggaggaacttccagagacttatataaaatcatcagatcttgtgagaactcactgtctcttgagaactcgggaactcactgtctcttgagaactcactatcatgagaacatcatgggggaaaccacccccatgacccagtcacctccctcccttgacaggtggggattacaattcaatataagatttgggtggggacacagagccaaaccttatcagcctctgaagccagacagccaaagttgaatcctggctgtgtcttgccttggtttctctagctataaaatggaaatagtacagccacttgctttataaaattattattgaggatcaaatgggctaatatgtgtaaagtacttataggtgtccctagcattttcctaaggaattcttagtatatgtcggctatacttaatatgtttcttttgtaaacttctatatctttttttttgagacagggtcttgctctgtcaccaggctggagcacagtggtacaatcatggctcgctgcagcctcgatctcctggtttcaagtgatcatcccattgcagtcccctccttcctgaactcccatgcctgactaatttttaaattttttgttcagacagggtcttagtatgttgccctggatgctcttgaactcctgggctcaagcagtcctcctgccttggccttcagaagtcttggggttataggtatgagccactgcacctggccagcttctgtatcttatagttccttttcccccaccaaaaccagttacagatgtttttttgaactgggttggcttcttacattgccttttacaatgagttacctttagagggcaaggttttctgtttctcacttttctgtttcttactttttaagctttttgttaaactcacaccttcattttgagtaataattgtagtgtaatgttacagcatattttgagattataagtttttttaagtttggaattttaaaataggcaactttgcttttatacataaattactgttatatgcctttagttgagaatactgactagaagagtaagattcaacttaagatgctaggtcctggtaccaggtttgaggtaaagtgaggatgagggctggaggataatgatgtagctgagaatagacagacgaaatactttattaggcttctcaggctaggaactaccagttaccgtgaaaggtgatgatgtagcagaagtgagcaagtggcctgccgaatttgagtgcaagaggaggcactgagtggggagatgagcctggttaagttcttgcctttataccaaaggtcgtcttcaaggtgtttttgcccaagtaggcaactgtatgcttatcaaccgtcttgaaattctgcacagaattctctgggtttatacattgcacaaatttgaagaacattgtatagtggtcatcagttgttatgatacactgctgcctcactgtgggtgacccaacccatttgttacaatttgtccccagaggttattccctcccagccccccacaaaaaaagactgtgggtcttttgactgggaaaattaccattattgtgagtactatttttttttctaaagcgaccgagtagatccttttctccgataacttgatagaatacttagatttttaaaacagactaccaaatgaatttaaaaccaaattaattcaacattctcatctggccataaattgagttctttaacatgtagtgaagcaaagggtgatgtccccattttggcactttgctttcttaagttagtgttcattaacaccagccccaaacagactattgtgattatttggagccttgaagtaattgtgtccgtggggacagtagcatgtgactagggttctcattgaaacatgaggtttctggcatattttgagaggtactgggaagggatgtaaggcaaagtacctcatttataactaccaaaacaggttatgttacaagcaagattacagccttacagcatcagttttgaaagtaatagagtgaaatgatatagcatagtttgagattataacttgttttaacctctcagaattaagttgtccaagacaccatctagtttaagcagttaatataagctgcttaaatggtggtaataataagcaatattacatgtttatgatacttgttttactgtaagctacagtaaatctttagtacttacaaacagggtgacatattttgtagactaagactggtcagatgatattctttcccatatttttgcagaggctagatgttgaaaacagtgaagaaaaaaatacaattttttattgacttctgtaggatttatacaaagcccttttttaaaaatgtgaagtttgaaagttcataccatttattcactaaatacagtttatcagtatttatctcagctaggtgcggtggctcacgcccgtaatctcaacactttgggaggctgaggcaggtggttctctcaagtccaggacttcaagaccagcctggacaacacagtgaaaccccatctctatttaaaaataataaaaatataaaaaaatttaaaaaattatctctgaatataatgtcataaatttagagtgacagttgaaatgaaatctttcttaacagaaggtttatttttgttttttgtttttttcctcaggcttcatggtgtattagataaacttcgctctgttacaactggtaagattcataacttttttttttaatttctgcttgctatggcatatgatttgtttctttctaaagtcatagtgctttgggaaaaacccatcaatttcaaaacggttcatttgaacttttttagaaagcacatacttttatgaacttaagagcagtaaatttaacataattcaaagataatttaagtgtgggagagggagcagtgcactttatccgaaggaaataattacatatatgtgcaaagatttagcctcaaggatatttcagtattttataattgaaaacaatttaaaagttcagtcataataaacgaaattgttgtattaccatgtgtggaataatatttaactattaaaaataatgttgtggaagaataacagaatatacacgcataagatacatgttttaaaaaatgtgtatatatgctcttcccccgaaaaatcacctttgagataattggtgatttttattatatttttaaaattttctacaataaacatactgcttttgaattggtgatgaggaaggaaacgacttaaagtaataaaaatagatggccgggcacggtggctcacgcctgtaatcccagcattttgggaggccaaggtgggcggatcatgggctcaggagatggagaccatcttggccaaccaacatggtgaatctccgtctctactaaaaatacaaaaattagccaggcatcgtggcacatgcctgtaatcccagctacttgggaggccggggcaggagaatcgcttgaaccagggatttggaggttgcagggagccgagaacgcgccactgccctccagcctggcgacagagcgagactccatctcaaaaataaataaataaataaaaataagaaataaaaatagattaaaaggactgtatttttcttttcagaaccctctagtctgaagtcttctgataccaacatctttgatagtaacgtgccttcaaacaagagcaatttcagtcggggagatgagaggaggcatgaagctgcagtgccaccacttgccattcctagcgcgagacctgaaaaaagagattccagagtttctacaagttcgcaggagtcaaaaaccacaaatgtcaggtaagagtctggtgtagacctgctgggggcagatggctctgtgtatgtgacatttatattagtttttatatctttcagtttgctgttctcagcaatttttagaaacaatgaagtgatcgtgagtagttttttgaataaaataatggataagatctaagtatgattatcttttatcacaaatttagtaaatcaaagttgaaagaaagtgcaatttcaaagcagttttgaatggaatatgtaaagggagtatcctcagttttttcattgaaatttttcaagtaaacattctttaaagatttggtgataattgccctaatttggctgtaatacattttgttgttcttttaaatagacagacttacgatgatggagctgcaacccgactaatgtcaacagtgaaacctttgagggagccagcaccctctgaagatgtgattgatattaagccagaaccagatgatctcattgacgaagacctcaactttgtgcaggagaatcccttatctcagaaaaaacctacagtgacacttacatatggttcttctcgcccttctattgaaatttatcgaccacctgcaagtagaaatgcagatagtggtgttcatttaaacaggttgcaatttcaacagcagcagaatagtattcatgctgccaagcagcttgatatgcagagtagttgggtatatgaaacaggacgtttgtgtgaaccagaggtgcttaacagcttagaagaaacgtatagtccgttctttagaaacaactcggagaaaatgagtatggaggtttgtatgtacttttaaattctggcttaggctaaaaatcggcagttcttgataccaaataatatatgaagtaactaaacacatattccaaggctgggcacagtggctcacacctgtaatcccaggactttgggaggccgaggcgggtggatcacgaggtcaggagattgagaccatcctggctaacacggtgaaaccccgtctctactaaaaatacaaaaaattagccaggcatggtggcaggcgcctgtagtcccagctactcgggaggctgaggcaggagaatggcgtgaacctgggaggcggagcttgcactgagccaagatcgtgccactgcactccagcctgggcaacagagcgagactccgtctcaaccaaaaaagaaaaaacaaaaaacaaaaaaaacacatattccaaatttattttattttattttactttttgagaaggagtttcactcttgttgcccaggctggagtgtgatggcgcgatctcaactcactgcaacctccacctcctgggttcaagcgattctcctgcttcagcctcccgagtagctggtattacccgccaccatgcctggctaattttttgtatttttagcaaagacagggtttcaccgtgttggccaggctggtcttgaaatcctggccctgtgatccacccaccttgatcttggctcactgcaacctgtgcttcccaggttcaagtgattcttctgattcagcctcctgaatagctgggattacaggtgtgtactaccacgaccagctaatttttgtatttttagtagagatggtgtttcaccatgttggaccaggctggtcttgaactcctgacctcaggtgatctgccctccttggcctcccaaagtgttgggattacaggcatgtaccatggcgcctggccccaagtttatttttaaattgttttatctgctgtttctcatgctataccagattttcttccccatggcttgctcctagagttcttttgtatcacatctgtatacctttttgggatttccagcatttgagatattaatcttaaattaatttggggggtttcaatcaattttagattgttcatggtaattgctagtgagcaaccaattaactctgttttattagtttcctcaatagcactatatgcagctgttgataaaataaatgtaaagttctaatttttgttttagctaaaggttgactgttagggataatatttatatttatagtatttatttatttatttattttgatacggtgtctcactctgtcgcccaggctggagtgcagtggcatgatcttggctccctacatcctccacctcccgggttcaagtgagtcttctgcctcagcctcccgagtagctcggactacaggcacatgccgccacgctcagctaatttttgtatttttatagagacagggtttcaccatattggccaggctggtctcgaaatcctgaccttgtgatccgcccacttcggccttccaaagtgctaggattacagatgtgagccaccacacccagcctcatatttatatttttacataaaaccaagaaatactctgtgaatttctcatattactgtgtactgtttttttcttaaaatggaaacattttgtggtagaactcttgttattttctgagattaggtaagcataaattttatctgattgcaggatgaaaactttcggaagagaaagttgcctgtggtaagttcagttgttaaagtaaaaaaattcaatcatgatggagaagaggaggaagaagatgatgattacgggtctcgaacaggaagcatctccagcagtgtgtctgtgcctgcaaagcctgaaaggaggtaccttgaacatggctgtaaattaatctttaactgccttggtggagtcttcctgatttattgaagagaataatcacgaaaataatttttgtttgttttttgagacggagtctcgctctgtcaaccaggctggagtgcagtgccacgatctcggctcactgcaacctctgcctcccaggttcaagtgattctcctgattgagcctcctgaatagctgggattataggtgtgcactaccatgaccagctaatttttgtatttttagtagagatggtgtttcaccatgttggaccaggctggtctcgaactcctgacctcaggtgatctgccctcctcagcttcccaaagtgttgggattacaggcatgagccaccgcacctgacataaatatttaatgtaataccgtgtaagacttttccattgggttttgagaaacacgttaatgagagaaattgcttaacattggagaggattgcagagaatattgactaatatggtggggtgaggaggaacaacatcaattaagattcagatttattatttaaaaaaactaaaaggggcctaggcatggtggctcatgcctgtacctagcactttgggaggctgaggcaggaggattgcttgagaccaggagttcgagaccagcctgggcgatgtaatgagtctttgtctcttaaaaaaaattaaaataaattagttggtcattgtggcaggcacctgtagtcctggactggagaggtggatgtggaagcattgcttgagcctagaagtttaaggctgcagtgacatcacactccatcctgggtgagagagtaagagtctgtctaaaaaaaaaaataaggttccagtgtagttggcattttctaaaaactgcagctagtctgtttaaaacctagagaaggttgtggtaaaggcataatagatggctggcctgtgaggaactgaaatttaaagtttaataaaaatacctttcttaactcttttagaccttctcttccaccttctaaacaagctaacaagaatctgattttgaaggctatatctgaagctcaagaatccgtaacaaaaacaactaactactctacaggtaatttaaatgtattatgtttacacttggtaagacatttctgtaattcttgagtaaggtgaaaatgattgctccttaaattgtaaaataaaggtgcctgtcagatgtcaagaccaagatgaggttcccatatagaaaaatggctttaaaaggaaattgacaagtttgagaaacttcgccaactgttattggactgtagtttttcaagcaccatataatgccttttatatctttccaatgtgtgtaaaatatatagtacgtaaatattttgaagagaattttgatgaagtaggactttcatattagtagcattagattcaacattagatatgaatttacgatgtgtaaaggggagtacaattggacaatgataggtatctgaagttatagaaatttgttaaacagtagtatataaacaaggttggtttcttcccttttggcggaactcattagtagaatataaggcagagaattgactcatttgtgatgttcctgctccaattctagtggaagtactgaataattttatgagagaatataaaagtattacgttttcaaaacaggagatgaatcagctgtaagctggtcttacggaaagctgattctgaaatgcaaacaactgatgggtgtcattttgtgttgtcaaattctgtactctctggccgacctgttgtagccaatgtgtaaacttgtgttaagaagctgatggtaatgagctactctaaaaagatttaagttttgctgtggatttggtgggtgtacttacagcattgccctgcttatccactctctcgcttttttttgtgaccccccttcctaaaatgaggtaaactgtagccatcagtttttttatttgttttctttttttgaggcgaagtcttgctctgttgcccaggctggagtgcagtggtgtgatcttggcttactgcaatctctgcctcctgggtccaagcgattctcctgcctcagcctcccaagtagctgggattacaggcgcccactaccatgccaggctaatttttttgtatttttagtagaggcggggttccaccatgttggccaggctggtctcgtactcctgacctcaggtgatcacctgcctcctcggcctcccaaaatgctgggattacaagcgtgagccaccgcgcctggcaccatcagtttttgatcctgatacttgtctgtcctcttggttctcctcatccctaatttaaccttgaacacaaaattcaacaggttttggcatatagaataaagattatcaggcaaaggcgcactcttgacctaatgatatatctacatttcatttcctgatctatcagcaatattaattgtctagaatgatgagaagtttagagaagttccatgactttgaaattttctttctttacctaggttatctaaattacaatttgaaactcatataagatcatgaagctaagcttaaataaaccgcattttgttgaaaatgaatacatatgtactatattgtattcatggtatgtggttgtatggatattgtttacatatgtttggataaataggttcaggtatctatctcagtaacgtaagaaaaaatgaatggtatctatggattgaactcctcatatatatgttcttttcttttctttttcttttttttttggagacagagtctcactctgttgcccaggctggagtgcacagtggtgcaatctcggctcactgcaacctccgccttccgggtttaagcaattctcctgcctcagcctcctgagtagttgggattacaggtgtgtgccactatgcccggctagtgtttgtatttttagtagaaacgaggttttaccatgttggccaggctggtctcaaactcctgacctcaagtgatccacccaccttgcctcccaaagtgctgagattacaggcatgagccactgcgcccagcctgaactcatatgtcctaaaccaaaggaggcatttatatttaatatgacatagtcactgtggagttttgacgtattactgcatttgtatttctatcttttttgcttttatgtgaaagttccacagaaacagacacttccagttgctcccagaactcgaacttctcaagaagaattgctagcagaagtggtccagggacaaagtaggacccccagaataagtccccccattaaagaagaggaaacaaaaggagattctgtagaaaaaaatcaaggtaataacttaaatgatgtttcactctttactacagttttttcatgaggcattgaatattttccaatggatttttatgaaatattacactatgaaaaaagtgatgattaagcccagaaatagaatgagaagaataccatgaggaaggttcataccaacacttcagaaaaaaattttttttttaaagaggtagggtcttgctgtgttgcccaggcagtcctcaaactcctgggctcaagcagtcctcctgcctcagcatccttagtagctggaggtgtgtacaagtgtgtgccactgcacccagccctttctagaaatttttgaaagtctttttattgtggaaatttttaatattctcaaaaatggaaaggctagtacagtgaactctcatgaacccagtcattaagccttagttattatcagaattttgctggtctttagatagctccttcttaaagatatatttatttctgcattctttctttttctctttttgttgatcctgcccgtttacctgaacttgaaattttagttacctttaaatctcccgtctcttaagcatcctgtctctgacctcccatatgtgtcccagcaaccctaatttatcccctcgtgcctaacatacttcagtttgcttccaggttttttttttttttttttttttttgcttttttctcagctttctcccccaattcctatacaatcttttgactttgaaagtgtgtctctcatcttctgactcctttgtgaaagtatctctcccctcctcctcattacccagaactaacgctattagtttggacttttggtgtctgttatctgacccctgggcctgcacagcccttctccatgactcttcagaccttttgtctcttttgtcgtcaagaaggattcttttttcttctgtttctttttctactaagatttgaattttaagaccccaccaaaaaaatctatatgcttattatgttatttctcacatacttttcaagaaccttggaatatattttttcatttcttcaaaactgtcctttaaattgttccaggtttcatgaaaccttatgatttcagaattgtcaattctgtatttgtttcctcattgtgtctctttaaaaatttttgactgtattgttcagtttgccatgacagcgttatatactattctgataattgataggcctgaggacaagacctgtttggtccccaaacagcagataggtaccaattggaaaatgtgaatgggccaaattgagaagaggagctgaaactgaggagggattttgctcagtgcagtggcagatgaggctgatctaaaaggactgcagtggtctactccctgtggagtctgtagtgtgttgcaccaaggttttcttcaaacacaggactctacgtgagagtcttggagtggaatcagatggagcagggaaacagacaatagagaaaaggaaagaatgtcagataaaaataggagaggaaaacaataggaaatctcaaagcaaggtgccatattttttaacatcacaaaatcaacagaagaaggttgttgattctgaagttagaatagctatccaaagcaaactttcccctaaaatgaacaacagaaaagtatcaaggtcaagtcctgtgccgaattaaaagataaaagggaataaaagacaaaacagcattgtttcaatgaaagcatgctgaaaggtataccaaaaagaaatacaatttcaaagtgagctagaagacattatttaaataatacaagacaaagccaagaaaaacataaaacagaagaactttgaggctgggtgcagtggctcatgcctgtaatcccaacactttgggaggctgaggcaggaggatcacttgagactagcctgggcagcatagcaaaaccctgtctcgacaaaaaataaaaatattagctgggcaaggtatacacctgtagtcctgtctccttgggaggctgaagtgggaggattgctggagcccgggaggctgaggtgggaggattgctggagcccaggaggctgaggttgcagtgagccacgatcataccattgccctccagggaggctgaggtgggaggattgctggagcccaggaggctgaggttgcagtgagccatgatcatgccattgccatctagtttgggcgatagagtgagactgtgtctcaaaataaatgaagactaaattagaaagaactcgaaagaattagtgcgtcttaataaaataaaacatgcgtgtaatcccagcaatttgggaggccaaggcgggaggatcacttgaggccaggagttgaagatcagccagggcaacatagcaaaaccttatggctacagaaaacagcaatttaaaaataaataaaattaaaacatcttcagagaaattgaagataaaagacaagaacattttaaaagtctaaaagggctcatgagaaagtggcaaatattgataataggcaatagaaatacagtgtttttatagtaggaatctccaaagaaacaatattcagaggaacagagcaaacattaactgtctttcaagaaaactttcatgaagtgaaaacatgtttgaaactgttgtctgaaaaattgtacagtatacctgagaatatttacccagaaccataacactaagatgtattatataattaatgaaattttaaaaagaaaaaaaatgatttggacattcaggcaaaaggggcacatgacttagaagaaaaggaaaggtagattatcatcaaacttttcaacagcatcacttttgtgctggaagaaaatggactagcatatttaagatactccagaaaagaaaatgtgagccaagaatttaatgtccagcaaaagtgacctttagaagtgatccagcaccaactgttatctatatgcagaaattcagagactcattcccatgaacttttcttaggaaatctaatggaggatgagcttcagacaagtaaaagcctgttgtcctgaatttacattggaaatgtttcggaactcacagtgtattttatatataaatacatttttttctagttctgtctactagaaggcatagaaacattcatcaacccttagcatcatctgtagttcccagattgtggtcttggaatacttcctatttaaaaaactaggcttcttgggctgggtgcagttgctcacgcctgtaatcccagcactttgggaagccgaggtgggcagatcacctgaggtcaggagttcaaaagcagcctggccagtgtggtgaaaccccatctctactaaaaatacaaaaaaattagctgggtgttgtggtgtgcgcctgtagtcctagctactcgggaggctgagccaggagaatcgcttggatccgggaggcggaggttgcagtgagccaagattgtgccaccgtactccagcctgggcaacagagtgagattccgtctcaagaaaaaataaaaataaaaaaacaaagaactaggcttcttgagaaatgtctttttccaggtctggggcaggaaatgttaacatgatcctggaatggctcaacatcccagatagcaaagaagctgtcaatgaatggtagaccacgtccaaaggatgcaggcgccaacttagaggtttccattggccaaaaatggaattatttgagattcagtaggtgtaaatatcgcggtgaattaaagcccatttaaatccacaatttcataatgacattttaaaaaaataagctctaactagtcaccttctggaaggtagtagataatcattcattgtcttgaaaactgggtaaataaaataattgaacatttatgctgtcttttctgtgagaacgataccactgggtaaccccataggacaggagttggcatctgttggaaccaaaccgtgcctattcatgtatgtattgtccgtggctactttcatactacagccttagttgaatagttgcaacagaccatatagcttgcatagcctaaaatagcctaaaagatttgccaacctctgatatagtagatgagagaaacattttcttttaaaatgatttcagctgataagagaacaagatggtaggattagagttatgcttttaagagtgaaaaccagttgttttgtgcctcttgatacaaaagaacagaacttttgtcttgccaaaaatgtaaacctaagtcatcaagctcccagtccagcagtcagtttgcaagaagttgcagaggccagaggagtatgttggttgagcttcaccatgagtgtgcagccggaaaaatagtgtttgggacactgtgggttgaatagcctgagaaattgagattaaaaggcaaatcaaaggaaaataaaaggagcaggattaaattgtagtggctagggatacccagtgtgtgtgaaattataaagaacctctaggcgttaatataaaaagcacatagtggttgcttttgaagaggaccgataaagatggagcacacagagaggcttctggggtggcagatgacgttctctcttttgacttggatggtagtcagaagggtgttttgccttacaaaaattcattaagctatatgtttgtgtggttttctatactgtgttttaaaaggggataattgaaatggtgtcaggtacctttgctgatgaggagtttggtattactagatatattcacaagtgtgaagtgatactgcaagcaactgttatctgttaatgtggttactcactgttgtacggtataatctggggcaggtttttaaaatataaacatgcactcgtattggcataagttgttaattttttttcttcttttgtttgagcagatagcattctctcatttctctggtgtctttatttttactagcgcacccacctcataatatgtgtactttttgctttttgtcttgccatcagtctgtcactagaagtttattttgccgatcttttcaaagacttaacaacattattctggctttattgatttttttttttttttggtgtttttgttttctatttcattgacttgtgctttttttttattttttttttttaagaggcgaggtctcactgtcacctaggctagagtacagtggcacaattgtagctcactgcaacctcaaatgcctgggctcaaatgatcctcccacctcagggaccataggcacacgccaccacgcccagctaatgtttaagtttttttgtaaagatggagtctcactatgttgcccaggctggtctggaactcctgagctcaagcagccctcttgcctcagcctcccaaagtgctaggtttacaggtgtgagccactgcacctggcccgacttctcttttaatttatccttccatattttaaaaattatttacctcaggctgtcttcttctcaaatgtaagcatttgagaagaatacatatgacaggttttaattcatcatgttttcattatcagagtgtctttaatttccattataattttcatcattgaaagtgtgttttctatacagtatttggaagtggtatgtgtttttgtcttttaatcctttttattatagacacctgacttaattgcattgtggttagataatgtaatttttacaatgcatagtttttgaaaattgttaacacttgcttagtgcataatcaagtttatgcatcttccacatgcattttggaagaaagtggactaattattggatggggaattttacatttattcagtagataaagctctactgttaacattattcaaatcttgaccttgctgagtttttgtgctgcttgacttaccacttgagaaagggtgttgaaattgcccaacatgatgacagatttatcttaatttctcttgtacttatatcaagtttttgctttatttttaggctgttatatactattaggtgcatacatatttaaatttgttatatcttctctgcaaattgaatcccttatcttgatttatgaccctctgcaaaaaagatgtttttatctcaaagtcagttttgcctgatattaatatagccatttaattatatttgctttatatatctggtttccctgcctttgttttcagttttctctctcatgctttaggtatatacagttgacccttgaaccagacaagtttgaactgtgtgggtccactcatacacttatatgtggatttttgaaaataaatatattggaaatattttttgagatgtggcaatttgaaaaaacttgtagataaactatatagcctagaaatagtgacaaaattaagaaaaatttaggtatgtcatgaacacataaaatatatgtagctactagactaacatttactatcttaaaacatacacatctattatgaagtttaatttatcaaaatatatgcacacaaacacagactttacatgataccgcttgtagttgagagaaatgtaagcaaacataaagatgcagtaatagctacataagatttactatagtacatactgtactactgtaataattttgtagttacctcctgttgctttatggtaagctaaggtgttttgagtgtccacttaaaatgctgtgtgatgcaaccatctctgcgacagttcagctctccagtaaattgtgaattgcagtgaaaggtgatctcgcagttcttgcatatttttcatcatgtttagtgcaatactgtaaaccttgaataacaccaggggacccataatgtgctactggtgatgctggacatgctcccaagaagtagagaaaagtcatgacattacaagaaaccattgctcagtatgtaccaaagatacatgttacaactgtggctgcagttattcaccatttctggataaatgaatttaacataagaaccatggttaaaaaaaaaagaaaaagaaaaaaatgtatgaagctgccactgcagctacgttggcaacagtaagtagttaaatgtttgggaagtcaaaagttgtatgtgggttttcaactgttgttgggggattggttcccttagccctcatattgtttaagggtcaactatatattatatcttaaatattataaagctggattttgttttttaatctcatctgagtttgccttttattggagagtttagaccagtcacatttattacaattactggtatagttggattactttctgtcatcattgctgatttgcatttgcctgcttttctgttttttctcatgttttttaaggttcattaattactgttattgttgacaaccctaaccctggttctacaattttaaactagtttactgtttaaaccttccctttctgttctttttttttttttttgagacggagtctcactttgttgccaggctggagtgtagtagcgcgatctcggctcaccgcaacctccgactccttggttcaagtgattctcctgcctcagcctcccaagtagctgggattatagacgcccaccactacgcccagctaatttttgtatttttaatagagacgaggtttcaccatattggccaggatggtctcaatctcttgatctctgatcccctgaccttgttatctgcccgcttcagcctcccaaagtgttgggattataggtgtgagccaccatgcttggcctcatttctgttcttttagtcgttaccagtgaaattttaccacacaaatttaatttagtattctaaaagttaatatcctgaccccactctcaaacagtaaaaggacttttgaatacctatgaagagcttcagtctttatcctcctcatttacttgtttccagtgtttcaatttgatcttttttaaaatgcacaagttgggccgggtgcggtggctcatgcctgtaatcccagcactttgggaggctgaggcgggtggatcacctgaggtcaggagttcgagaccagcctgaccatatggtgaaaccctgtctctactaaaaatagaaaaattagccaggcatggtggcacacacctgtagtcccagctactcaggaggctgaggcagaagaatcgcttgaacccaggaggcagaggttgcagtgggctgagattgcgccgctgcactccagcctgagcgacaaagcgacactccttatcaaaaaaaataagtaaaataaaatacacaagttggacaacatttttgtaattttttccaggcaatgttttttgaggtttacctcctgtttatcattttacttattcttaacatctctgagtgttatttggggatcattattttccaatattttgaagtatttttgaagtatttttttggaagtttcactgaaacatgtctgttggcaatatattttccaagagtctattcacctgtgagtgttttctttctttgtgttcttgtgcagtagttttgctggatacccaaatctaggttgttagttatttgctctccacaccttatatatattattatcccactgtcttctgctttccattgttgagtggacttctatcattctaattgtctgtcgttcctttgtaggtgatctgtcctttctctctggctgctttcaagatcttctctttgtgtttgatgttctgcagtttcactacgatgtgtctaggcgtggatttccttttatttttcctgtttggtataatgtatggaagcatcccatatatttgaaataaaatgcattatgaaatacatgctcaccatagaaaatctggaaaaagaaagcatatcaatgtaatatctcctgatagatgagaaaataatcaaatagtataaaaaagattaaaaataaaaagcaacattccttacttcattcttctctatactagtcccactccgcagaatcccccacttttaaatgcttctgtttctttctccgtgttgtaataatatgctttatactgtttcttcattgaccaactagatagtacctgttgatttcttgctgtatgtcaggttctagcccatttatacttttcccttgcttccaagctcatacagcaaaatcaatttttaattcatttattggttactttagtaattttaagtagtaacttaaatatttcttgtctggttatatttcagtatattttgacttctgaaagatatgtatccttcaattcctttttttttttggaggtagagtctcacttttgtcacccaggctggagtgcagtggcgtaatcctggctcactgcaacctctgcctcctgggtttaagtgattctcctgcctcagcctccttagtagcttgggactacaggcacaccctgccacacctggaatttttaataaaatttttagtagagacagggtctcaccatcatgcccaggctggtctcaaactcctgagctcaggcagtctgcccaccttgtcctcccaaagtgctgggattacaggcataagccaccatgccaggcctctctttcaagtcttatattttctttcttgccgccacctacattctgtcctgcctccaccttctaaattgtcacctgttcttttatattgtcaaagctgatcaaatttacattttgttccctactttagttaagacttagtcgattgactctaagttgagaaacagtaagcatttacactgttaagactatttagtctgggcatggttggtggctcacacctgtaatcccagcactttaggaggctgaggtgggagatttgcttgagcctaggaatttgaggccagcgtgggcaacatagcgagaccctcatctatatatatattttaatgttttttaattagctgggtgtgatgatgtgcacctatagtcatggctactctggagaattgcttgagcccaggagttcgaggttacagtgagctgtgattgtgccagcctgggtgacagaccaagaccctgtctctaaaaataaaaaaaaaattttaaagactatataaatattacaaggccaaatttacattctgtttcttgtacagttttgtgtgggaactctctagagtttttttaatttttcccccttttttgtttcccttaggttcttcttttttcccttctttcattgcctacctgtactgtagcctaaaagtcttatcactctgtgctttgaaatctttgggtttcccactttttcttaggtaccttcctcctggagcctctctcctccttttctgacctcactgcttgctctaggcctgctcaaggccatcatcccgaggcgccctcctcccctgagtcggctctgcaattcctgaattccattttgtcttctcagtgcatttctccgttttgtaatcacgtcacaaagaaactccttaagaaagtatagaaggtaaattttctgagttcttggaaatctgaagctatccttgtacttgtttgatactttgactaggtacagaattataggttgaagtcattttcttcagaactttgaaggcatagtttcattatcttgaggcttcagtgttgatgctgagaacttggttgcccatcttattccattgtgtaatacctgggatttttttctccgggaacttttttttttctatgttcctggtgtctgaaatttcactgtggtatgtctagatgctagttaggtacattaggtacccttttaatttgaaaattcattctcttccgtgtgggaaatactcttgcattatttgttttaaaatttgctgtccttgttttcattgttctctggtggaaattctgttagttggatgataagcccttactttaatctgtcagttgtatattttttctctcttgatttttgacttgatcttgttggtctactcttgaatacttgcttgacttgatctttagtctccttactgaacattttaaaaatgtaggcaagcatattttttaatttccacaaactttttcttgttctatttttcatagtatcttactttgtggatacagaatcatctcaactgtctgaagatcctaattaaagggattttttttttcttttcaaggaattcactcttgtcttctaattaatggagtcagagtcagattttatgctttttttcttgctctttcgattatggaatttttttcaaaaacatctgcagatagtggttcctagtttaaggaaaggtagtgcagaggcttacctagaattgtgctgtgggctgagcttttctgcaggcaggtttagctttcaatgaagcagacaaggagctgcaattggccttgcagttgtagaggaatttcttgggggagcaggttggtatgcttacactcctactggttgtctattaaaaatattaaaattttgtcttttaaatgtctgtctctggcagtaccattcacaagccttcttctctgccttacatccttcttggtttttactcattgctgcaatctctcacagttggatggccctttgtttcatccaaattcaaggcttgatatatcatctctgcactgtgactctcacatttttatatctccagcctggaccttgccctgaattcctcatttctgtccaaccactttatatttcttcttggaggtgtaataaatcatttcaaacttgtccaaagctcaactatgaattttcctctcctgtctgttcttcctgtagtcttcctcattttagtttattggtgacttcacctttccagtttctgagacagaatcctgttgccattctttttttctctccttctcctttccttcctcttccctctctacctctgtctccctccttcccttgttccacctgtcagcctctacctccagatttatagaattcactaccgtttatcacttctgcctctaccacccatcaaagtcactgtctggccgggtgcggtggctcatgcctgtaatcccagcactttgggaggccgaggcgggtggatcatatgaggctaggagttcgagacctgcctggccggcatagtgaaaccccgtctctactaaaaatacaaatattagctgggcatgatggcacatgcctgtagtcccagctactcaggaggctgaggtacgagaattggttgaacctgggaggcggaggttacggtgagccgagatcatgccactgcactctagccttggtgacacagtgacactctgtctccaaaaaaaaaaaggcaaaaaaaagtcaccgtctgtgatttgccttggttacttgattattggaatagtgtgttcttacaaggtgtgcctgctttcaaacttgccttccttcagtccatcccacacagcagcagcagtgatcctttacactgtaaattagatcatgctactttgcagcttagaaccccccaggggctccctgtcacactgtaagtcacagtgttctgccttctcatcacccacctgcctccctctgctctggctccccgtgcttgctgctgctcctgcacactggcctgcttgtccttcaggacgttggaagagctgcgcgtctcagatgcttttgccctctcctgagaatgtttactttggatgttctcatatctcatccatgtgtcatctttgaggccttctctggccccatccccacactccctcttttctgaagctttatttttccccataacgtttgtcaccatcaaatacatattttatgtttttgtagtttaggtatttttatccgaacgtaggtctttatgttttaacgtgaattgttttcttttagcatgtatttttttgggggtcttgagagctacctccttccccgtctcaacagagtctgtcctttttgagcagggatttatgtgtttgttctgtatggctgttactgagtgcccagagcagtgtctggcatatagtagcaggagctcagtcagtgtttgttgtctgagtaaatgtcactcctgccttgcatctaacctgcagttttcacaggggctcatttgtggttttgcctgctgtgccttacagccagtatttgtccatatattttctattacccagagattgttgacatctcatctgctgcaccttgtaacccccatctctaaaccagtgatctccatcatatttttgacctgaaaatttttgtacagtagccatttttaagtatgtataccaatatatgtattttacttacgtacacatgctgtattgatatgaatattagaaaacataagaatagaaatctgccgggcttggtggctcacgcctgtaatcccagcaatttgagaggctgagacgggcagatcattaggtcaggagttcgagaccagcctggccaacatggtgaaccgccgtctctactaaaaatacaaaaattagccgggtgtggtgatgggtgcctgtaatcccagctacttgggaagctgaggcaggagaattgcttgaacctgggaggcggaggttgcagtgagccaagattgcgccactccactgtagcctgagcgacagggtgagactccatctcggaaaataaaataaaaaaagaacagaaacccaaagatcatagggtagagatgtagatattaagttctttaattcacttttatggactcttcagaaggagagattataattgtatatgcttgatacattgtgttggactggaagcactgtgaaagattcttagtcaaggggagattttacattcaaagaaaatggaaaatccccctgctttgctcggagggaagaactgcacttaaaagtttgatgtgtattggtgtcgtcttctaggcatttcttatatctgtgaacatgtgcaccctttgtatataaagtggaattacatgtttacttacgcacacacacacatgtacatataaagcaggaattatactacccagagttctctgtgacatttttgttccacttaatgtatcatgggagagtccttgagtgtggacctaggagccagactaccgaaggtgcagaccctgcagtttactagttgatttaacctttctgtaccctagtttcctaatctataaatgaagaataacggtagcatttacttcagagttcttggtaggagtaaatgttaaaatacataagctttctctgctgatgaatatttacactggagtcttaggaagggtccttgcttattttctattctaaagttgggctggacatagtgggccatatgggtgccatcagatgggctcttgtttctctgtgacccgttctgttagacctctttcctgcttttttccttgaggttgtttatctgtcctctagtgaaccagctggtttgcaggtggtgcttttctgagagtgtcttgctgttaacagttactatggatgtcatatgccagctggttctgttaaaaaaaagtctgtgaatccaaagccttgaattttgaacattattttctgtctggaattttgaagaactgattcataaagtggagaaatgaataaagatttttattttacaaattccagcacttagcattttctttattctgttactgtgacatctatttgggaaaccaaagactaccattctttataaggattcctttttttttttttttttttttttttttgagacagattctcactctgtcacccaggctgcagtgcagtggcgcagtctcactcaccgcagcctctgccttcccaggttcaggtgattctcatgcctcagcctcccgagtagctggaattacaggcatatgccaccacgcctggctaatttttgtatttttagtggagacagggttttgccatgttggccaggctggtcttgaactcctgacctcaagtgatccacctgccttggcctcccaaagtgctggaatgacaggtgtgggcctctgtgccaggccaggattcttcttttaagagactatagtgagcagcatctaccaacttgcatccttgtatgttgcatatcttatttgtttgcttggggagtaaaccaaagtaaaaacgtcctttgtcaaattaaggaccttacaagattttctgtgttaatggattggaagtctttactattctttttttttttttttgagatggagtctccctctgtcgcctaggctggagtgcagtggcacgatctctgcttattcagtctctgcctcccgggttcaagcgattctcctgcctcagcctcctgagtagctgggataacaggcgtgcgccaccacacctggctgatttttgtatttttagcagagacgggatttcgccacattggtcaggctggtctcgaactcctgacctcataatccacccaccttggcctcccaaaatgctgggattacaggcatgagtcaccacgcccagcctagatgtctttactattcttaagatggcagtagtccccaagttgatctatggattcaactcaatccctgtttaaaccccaaattgcttttttttgtagaaatcggcaggctgatcctaaaattcatatggaaataaaaagggactgagaatagccaaaactattgaaaaagagtaacgttggcaaggttatgttgcttgatttcaaaacttactacaaagctagagtaatgaagactgtgtggtactggcataaggatgaccatacagacccgtggaccggaattgagaatccagaaataaatgcatactttcacaacccatcaatttttggcagcggtgttaagacagtttattggcaaaagaataggtttttccacaggtgatgctgggacaactgaatatccacatgaaaagaatgaagttggaaccttatcttatgtcataaacaaaaataactcaaaatggatcaaaaacctaaacttcaaaactcttagggaaaaaaatagatatgtcttggattccagaatgatttcttaaatatgacaccaaaagcacaagcaaccaaaggaaaaaagataactcggacttcatcaaaatttagtatttttgtgtttcaaaagatactatcaaaaaaaaaaaagacaacaaaatgggagagaatatttaagaaacacctgtctaataatggtctagtattaagccaaggctgagttcttatttccccatccttaagtttacacgatactatattagtgaagttgaattctgtcattaccacatgtatcttgaaagaagtttgtgtggatcacgggtccagttactttctccgccctttccctccagaggatttgtcactctcaataatgttatatactaatttcaaggggaaatacaactcaaaacaaatcagaaatctgaagcttaaaaatgttatggtttagatgatgaaaagggaaaagtacatttaattcatatcatatttagatgtaaagcacttaatgttatattgcttaacctataaagtagcgcttcagtgctctcatcatatgaagtaaataatagaaaattctttgtgtgacacatgtctgttttcagccaatcagaaaccaggattattttgtatgtaataatagggtttactggaagaggagctatacagatggtacttagaggatgtagggccctacgtattagggcttcttagttgtagcgaagagcaattggtctggtacgtttagctttttcacatttagttttgaattctgactctagaaatgtacaaccccatcttttgaattacaggttttaagatgttatttgctcttaatacgtcttaaggtaacagccttgatcactgcttttactttcgatgaaataacttaatgagctgtgaagaaaaaattatcagattttaagggagagaattttatgaaaatgtctttgaggttcctgtcacctttatgagaatgtcttcaaagtttccatcaccacctctaccaatttttcttccaccggagccagtggacttaggttccataacaagctcctcttgttcactgaatgagctagacaatatttcccaccttttaaggaaaatatcagctgatatcaatgaaattaaaggaatgaaagcagctattttgacagtggaagcaaatctttttgatctaaatgttagagtgtccaagaatgaagcaaaaatttcatctttggaggttaaaatgaatgaatattcaacaacatatgaatgcaacagacagtttgaagatcaagaagaagatactgaatcacagtcaagaactactgatgtaaaaataatcggcttccttagaaacgttgagaaaggtaaactcttaatatatgatatgttctaggtacccatcctttgatctgtatctttccacgtatgttgactgtagctctgatgtggagggagcaagttacagagaacttgaatttttcatggacctttaatgacaaatttggattctgcttgatttagcttagcaatctagaattgatcagaattccatcctctttaatggagctctctaaaacgatgttttgaaaagacagatgaacctagagcaatgaagcaaaacttgaaatgtggaagtgtggtctttcatgtgtcttgtgaaattattttaaaatgtctcattctttcatcatgtactgttgatgtgaaggagacctgttgcagtatttggatggaaagagcattcttcctgtaacttttcacctcagttttccaagcttcccacaggaatgcaacttgacctaagtgtcatcttcgttacagttcctcagaatgtgtgtttttttatggtaataattctggaaggaattgacttttttgggacgcaccagtaaaatttcatataacttatgttttaaaggaaactaactgatacaatttcaaatcgagtataggttttaaaatttaaaaacaccttttaatgaaatgtggtgcttggtgggagatggcccacttaacatctttgcactgagtaagcaaagcctgtccttgtgaagccacctgtaatggatatacccaaaatcagcatgtgggcatcttagtaagatttcagtatttgcaaccctatcagttacatccctttgtacactgtagtgcagtaccttataatgagcaagtgagtgcctgatgtctgctaagcgctgtgggggctacagaaaagtgtgacattctcccatcctcaaggagcttaacatcaaatcgaggatggaaaaaaatcagttctttgtccctattttgtgcagtcagactgctgggcatattattgttaggaatagtgaacctaataggaattaatgttaggagcctattttagaagaaataagtagttgaacatcttttcttgtggaagaggcaaagaattattatcatgctttgctaacatagggtgtggattgtagagctgagtgtcttattgttttctttgcatgcatcgaagcccagagtttgtcttttaggaactcttgtttagatgatgagagtgttttgttttgctatttcgattatcttcaaaggtcatgagtgagtcgtgatggtaagagctcaggtgatggagggaggtgcttgccatgcttattgtgcagttggctgtgatgcgagctgctgggccacaaggtgccttttcctggattttccacccgtttgccacctttactttccccgcagaattcaaattcaggaaaactgatgtcctcatagagggagaaccaggagtgttttaaattggcatttgtggtttaaccctgagtacagccttttttgtcttacaggatatgtctttggtctataaatactattaaattgaattgttgaagctttaagttacttttaagacttcaagttaagaacccagaaggattgatttttgggaaccacatgctggtattgtctgtgttgtaagcttagtgaagttttaaaatttatattctaggaactcaacagaggcaattattatcccgactgcaaatcgacccagtaatggcagaaactctgcagatgagtcaaggttggtaatgtttcaagttgtactgtaatccagccatttcagttgccatttccatttcttacaccccatttaacgtatctcggatctcttagatcctgccctaagatgttatatttagatctgtgaaaatattttagggccaggagataagatctgcatttctttcatgttatatagtgttataattttttgcctcattggaaaactttgttcctttcacaccattccaagtgtgtccctagcactgtcggctgtcactctcctgctgtcaggagtgacctgcgtttctgatttaccctcccactctacccagcttttgtcattgccatgagtggcttttgtatcctgtttttcacctggttagccttatcctcttgtacttcattttggagtcttatcaccagggccacacctggaacttgttgttctagtgttctagagccactctagtttgcctgtctcctttcctctccccacagacacacatgccaggggctactccaggactggagctgacgccttcatttttattatctctgtcctcagtgcccagcccctgccagatgcatgttcaatgtcttaaaaatgactgcaggataaacacaggcaaccatgagagacccggaatcatctcagtccttctgtttcccctaagtctgtcttttgtgggaagctctggtccctagacccctctcagtcaggactccacagtcagtcactctgttccccgaccctcccccagctttccagctcagaaagtgtgcttttcctccctaagggtcagcctccaccagaggccagatcccactgggttggtgagccactggcatgtcacccactcctccaacttcattctctgcctcctgtcttctctctgtagaggtgttcagacattctctgcccgtgattttgctctctcatctcccagcagtccgtcctgcttcctccacaggagtatttgaaaaggttgacagccgagatctgtgtgtgggatccacttcatcagctcttgtgcatgttttctcttctgcctccttcagcttttcattgtacccatggtgcacgcagtttgaaatagcaagtagttctgtgaggcttatgaatgactgcagtccttagctcctatcacattttttattctaagatccctttgtttctgcatattctattaattttctaaaaacatactgattttgtgtacacaatactctttgttatttctctgtggtctgaaaggtggttttgacatttttcccctccctgcttcgtcttgttttctctaagtggtctgttttggctgtcttttatgctggaggttcccctctgatgtctggggatcctaggtggtcttacatttaagagtggagcactcagaaggtcactggtattctgggttcatgagttggggcatggggcactttgactttctgtttgaaactagaccctgtggtggaaagtgatttgtcctgcctgtctggtttgtgggcaccctgatgtcactgccttcaagactttcctctcaggctggtcagcttctccaaaacaaagtttttcaagtaatagcctggtagtcagagttctgcgagcttaagtggggaaagaaggctgggggaggcacctcaccattaattattatgtaatgtttatttaaccctcccccaaccattgtcagtccagtacttctttcatcatggctggtgtctcttggtccagggactctgttcttatcctctgaagagtctaaagctccactttctccaagggagaatgcatgcagtgggtaaagatttatcaggaaatctaattgcctttaaaaatttttaacagtgtaccttcaggtgattttgtcgtagcatctttctggcagagaccctaatgcttcatccataggcctctccgaagattatctacaggaaagcacatcaccagtcatcccaggtgtcttcagtgtagaggtcgggattggtgtggcaagcatcaaaaccaagaaaacagtggccaggtgcagtggctcacgcccataatcccagcacttggggaagccaaggcaggcagatcacttcaggtcaggagttccagaccagcctggccaacatggcgaaacccaatctctactaaaaaatacaaaaattagccaggcgtggtggtgcacatctgtaatcccagctactaaggaggctgaggcaggagccttgcttgaacccaggaggcggaggttgcagtgagctgagctcgcaccactgcactccagcctgggtgacagagcaagactgtctcaaacaaagaaaacagatacatggaattagagttgaagaagaactaactgcttcttggacacatctaatacacctcttttttgcctgccatttcttccatttcttcctaaggtccttttactgccagttcctgagcctttggagaatcttgtggtctgaattggattgcttcattattgccttagaattcagcttttacagatcccctgagttcttaatcatctgttttccactttgaaaatttctttttacacttattttctttgtgagtttatgctttcaaaacaaaaacaaaacccttattgacatttctgtgggctttcaggagggaacaaaaagtaaatgcatggggtcagcctgtggtctctactcagaagatgttacttactcccccgtctgtctggtctccatgtgacctgggctgctaacgttccgcttgcagagaggtgtgcgggagggaccggtgcacgctttcctcaaccctggagcatgttacacttgggttcccatactttctccaagctttgacctttcggcttccagttcactctgtctttattcttctcattccctttcattctcatgtgtcagcgcatctcctccattcctcctcaaaaggttagctttgctctctcccaccttcagcattattttcatctcttctgtgttcacccaacctatgaactggtagaactccttcgtctcagaaagtgcagagtggtgggaaggagtgaagcagcccctgggccactgttgggacccacctttgacagttgtgagacctcggtgaatcatttaataacttggagctgcaaacagtcatctgtaacatgggaggaaaccgactttgtaggctttgagtgaggattcagtgagagacggccaccctgaatatgttaaacacttctgtcaccttcggttttgactcagcatcttatttctgtccccccacctacaggtcaaatctgaattttctacttcctcttaaacatgggagagtcccacaaagactttaaatctaacatggaaatgtatctttgccccttttaactttgctctttttcttttgctaagtttctcatcccagctttctcttccgcctgtctccctttaccatctgtactgcccttgctggggaaggcgggcacgccccttcccaggatggagcatgtcttctcttcctgtcaggtgtgtgagaccaggacagacagcagagaatcttttcattcagagcctcaccctctgtcccgggcaacagcaggtcgagaactctggttcttccttaacactgtttttctaaaaaccagtttgatcaggccacttccttccttaggaacctctcttgatttcttttctcttttttttttttttggtttgagatggagtctccctctgtcactcgtgctggagtgcagtggcacaatcctgctcattgcagccttgacctcctgggcccaagcacttctcccacctcagcctcccaagtagctgggactgcgggcatgtgctcccacgcctggctaattttatttatttatttattttctggttgatgggaggtctcactatgttgcctaggccggtctcaaactcctgggcttatggaatccttgtgccttggcctcccagaatgttgggattacagacatgaaccgccacaccaggccacttgatttcttactaattatagaccagaatcgagagtcactgagacatagaagaacctttattatatgtgtcagccttccttggtatgtactgctgagcccaccacacacacccttccagccattccacattctaacctttctcagatgccttcggccttgtgaaagcccctttccttctacgtgcgttttcctctgcctgaagtgctgtgttcgtttctccgagtctctctccttgtttattcctgcttgttcctttactgctgacttcagatgttcctccttgctaagcttttcgttggttcttggctggagtgggctgttctgtattctcagcaccttgttcacatcccttttgggtcatgctattctgaaattgtatatgtgtctgtttttctttttttctttgtgtatctagctcagttctcttagttgttcagtaaatactcagtgaatgaacataaatgaataccctgtaaattttggtctctaagctttaaaagaagtgtattaacttcagtccgttgatggcgtattgataggtcagccattctgggttgtaggtcttggcatattttataaaatagtagatgatgtgagcttatggttatttgcattaaaggccagtgtttttcttgatacatatgtttaagtgtccattcacctttcagttaccttttaaagtagtcctcggtttataaccaactggaaattataccacttgaattctttttatcaggacatgattctaagtggtactgtgcgaagtgaacaaaccagattttggaaaagtggttcagcagtctgtgtattctaattatagggagcattaggactcaaattctccaggtttttagaaaagatttttgtactttaagggtatattgttaatatctgttgagatgcctcacctgagaacctttctctgctgtggttagggagtgttaatcagaatcacttgtgccgtgccctacgcgagaaggactccttgagttctttgaaaacatgtttggaatagaattatagccctgttttcctgagtggaaccagttgtgattttcctttgaaataatttgaatatataaaagattgacattcttctcacatatataatgttgggaatgtaaggtatattcaaaagtaaacatttgtggccaatttttttggctcagattactatgacatggaatccatggtccatgcagacacaagatcatttattctgaagaagccaaagctgtctgaggaagtagtagtggcaccaaaccaagagtcggggatgaagactgcagattcccttcgggtactttcaggacaccttatgcagacacggtagatggtttctttttcttgtgtagttaatttgtgtgattagatagtaaaggttaaccattcgtttgcagcttccctcctccccgccctaaccgctagcgtagagtgctttcattgattcagtagctagcccatgaatagttagccaaattcagttttcaagaattccagttcatctttcttgttcagaaatccattaacctacaaattacaactcagtgtatgatttaactctattaaagattcttttctttatgcaaattcaggaaatgcaagtttaaaagccagctgaccataatcaggtcagctctaaagagagttggcagatcaggtttgggtgatttttcccttagaaaattgactgtttctataaaagaagaaacatacagataattagcataaatgctgctggcccttgtgttctgagcattgatgctaattttttggtttgtttccatgttgaccctatgaagatcgaatgggtgatggggtcaggcttgaggggagattgtccttagtaagtacaggctggagggtcactggtgatgccactgtgactgttcatggccatcgtgtgttagcagagaacccaccagtgctgcacctggtagccctacctagtctttttttattgaaccaaacgcaaagccaagggagtgatagttctgctgaagagcactttagggggctcagcgttttgtgtttgtttccctaattctatggtattttttatctgtctggcagagatcttgtacaaccagataaacctgcaagtcccaagtttatagtgacgctggatggtgtccccagccccccaggatacatgtcagatcaagaggaggacatgtgctttgaaggaatgaaacccgtaaaccaaactgcagcctcaaacaagggactcagaggtctcctccacccacagcagttgcacttgctgagcaggcagcttgaggacccaaatggtagcttttctaacggtgtgttgagagctcagattttcagggtgctgtcattgtgaagggaatctttgacttgtttctctaccttgaatgaatattggttaaaggccttgcttttatttatattcagtaatggccttttttcttctttcagacaaacccaccaagtacatttcagactctttttcctgtgtctttttcataggtgggctgttactccagtttgaaaacggagttcagccatggaacctgagagacctcttccgcttatgctggctaaaggatgaaccaccattcttgttgccttctttacctttgtattttcttcagaaactgtactgccactttgcccttttatcagcaatagtctcttgcaattaacttgagagaaaaatttagatttgatgctatttctacctcagtgaaatttctttgaaaggagtttctcacctaatctatcaagatcttggaactgtttaaattaatgttgaagagtaatatttagcagaactcagatgaactcatttcagatagcaccatagtttttggcaggtgacagtttcttatcaccgtttctttcactgggtatcagtggtagctgcaacgccactgatcatttccattcatgatagagaatggtaattatgttccttatatcttctaaaatatttagaagcacctcttcattggcaggagggataattactcaatcttaaaagcgtacagattcaaaggaaaaacagtaatggattttgaaacatttccttgagtaatcctcttcttggaagagatatgaaaatgtattgaatacctttctcgatcattaaaaatagaatagacttcagagggaaatcatatgttagtggagcaataacacttagctttattttaattggttgcgtttcctactgtgaatcaatgacgtagtgtcgtggttttgattagtggagggagttgaaaatctgaccctatcaacaggaagaaaaacttaaaaaatagtaaaagctgcagtaggcagtcccgatttattgactctgtatgttttgtctaaagagaagactccagtgttttcactactcttgattttcaatttggtaccttaattttttggtctattaggatctggtttcatttaaatgtaggtgtccatatgaggctttatggggtatacatgtagcagcagtgacaccataaataatatgttagtaaaaattcttgccagtgctgtggccattgtgctgacagccatgatgagtggtgagcctcctttcccattgctttgactggggactcagtgtttccctgctgctcaaggatgaagctttgtaagattagcataggggtgtggctggagagactcctgcagaacagttctcaggagtctctagtctctgcaccacttcccctgtgagcagggagtttgaaactgcaattgcttctggttggttttatgttgggttgtttcaaggatgctaccaacaacaacatctgttttaacctgctgtcttttcactcactgtcatatggcagcacagattttatagcttgctttctttgttttttttttttttgagatagagtctctctgtcccccaggctggagtgcaatggagccatctcagctcactgcaacttctgccttccaggttgaaagccattcttctgcctcagtctcccaagtagctgggattacaggcatgcaccatcacacctggctaattttgtagtttaagtagagacggggttttaccatgttggtcaggctaatctccaactcctgacctcaagtgatccaccaacctcggcctcccaaagttctgggattacaggtgtgagccaccgtgcctggcctatagctttcaataaaaggtgaatttgcctcttaaaatttgaacagaaagttttaatagtttacaaagtcggtgtcagccagtgaagactaggggcatgaccttcgtatgacttaatgtttttaaaagaaagataaagtttctttgtaaggtattattgtaataatcacatttctttgtaaagtattatattgttcctgagtatctagctactttgctttccagctaggcttctcttgggtattctcttaatcttttatttgtactgggttcttgtgtatatattatagtctgctgtgtgtaatttattataggaaaagggtaagacacatttactttgcggggatgacacaaaaaacctgtaaaaattagagaaacttccagtcatctcacattttctttggaaccgattattcttgtatcttagaactaaaatgacttatactgttttgtttttagaaagggtatccctcctgttgcccaggctggagtgcattggcacagtcatggctcactgcagcctccacctcccaggctcaagtgattctcccacctcagcctcctgagtagttggttactacaggtgcacaccaccatgcctggctaattttttgtattttttgtagagatggggtttcaccatgttgcccaggctggtctgaaactcctgagctcaagtgatctgcccgcctcggcctcccaaagtgctggggttacaggcatgagccaccacatcctatttaaagcttaaataggacttttactatttttaaagtagcatagaaaactgtttgtatcaggcatagtcataattgctctttgatgctgctcctatctgggctgcatgactacatttgtgtgccttgttctcctgtagtgaggacagaatgtgggtcactggaacagtaagtactcatagaactagctgctgctgctattacgactggttgcctgttttgcattttttccgtttaatcatcagactctaaggaagacattattttctctttgtatagatgaggaaacagaattccaaaaagttagctaacatttgcacagagtgtctggctgagcaactaagtggcagagtcagattttaactgacctctggcaagaggactagaggaatacagttgaagtgatacttgctttcatgaacatgaatgtgaaccataatacataatacccatgatgctattttgtggggagtttaaggtgtctcagtccagaaattagcagctgattattgcctgtagctgtaattttacttattcagtgttatttaataaattgccagcattacaatttcgatgaaggcagatttttggcttactgaaacaggataaaaatctggcaacaggggtcccactttgccctgtcatagtaatcgaagctgtgattggatgtggcacagggagtggagtggatgggtgtgcacttgctttccaggctgctgctccccgtctgtcccttattgcatttatcatcttcagcccagtcagtcttgctgttaggggaactgcccagtctctgtaagtgatggcatttgtgaccccattgtaggtaaaaatgttttcccctttttagacattgctggctgagcgcggtggctcatgcctataatcccagcactttgggaggccgaggtgggtggatcgcttaagtcctggagttcaagaccagcctgggcaacgtggggaaaccctgtagccaggcgtggtggcacgtgctacttggtaggggctgaggtgggagtatcacttgagcctgggaggcagaggttgcagtgagccgagattacaccactggcacaccactgtactccatcctgggtgacagagcaggaccctgtcgtaaaaaaaaaaaaaaaaaaaaaaagtaaaagacattgctgagtttcgcacctggacttacagctcagcaggtgggaatccttttgtatttgggccactcatcatcttgctggcgtgtgaggattcacatctccttatcaccttacctgttttcagtttttatttaattttattagttccccacttgacgtccttctctatttttaattcagctatgaattagtattgagaattagaatttttggtgaaaaatttggccgtagttgcagagtcactgtcctctttccttttcacagtgagaactgttgtcttcttcctggcaaccttttataggattctatggccagtgttaatcccataatttgagctcacttattttatatgactgtacatttaacagaagattctaagacaggtttgagggaaatatgttaaaggtgctgtgtactgaattgatcataatgaatgaaatacttttatttcctttccctttgtagctgagatgagtgaactgagtgtggcacagaaaccagaaaaacttttggagcgctgcaagtactggcctgcttgtaaaaatggggatgagtgtgcctaccatcaccccatctcaccctgcaagtgagtaccatccccccatctcaccctgcaagtgagtaccatccccccatctcaccctgcaagtaccatcccccatctcacctggcaagtaccatcccatctcacccagcaagtaccatcccccacatctcaaccctcaagtgagtaccatcccatctcaccctgcaagtaccatcccatttcaccctgcaagtaccatcccccatctcaccctgcaagtaccatctccccatctcaccctgtaactaccatcccatctcaccctgcaagtgagtaccatccctgcatttcaccctgcaagtaccatctcatctcaccctgcaagtaccaccccctcatctcaccctgcaagtatcatcccccatctagccctgtaagtgcgagtaccatcccccatcttaccctgcaagtaccatcacccacttcaccctgcaagtaccatcccccacctcagcctgcaagtaccatcccccacctcagcctgcaagtaccatcccctatctcaccctgcaagtaccatccccatctcaccctgcaagtatcatcccccacctcaccctgcaagtaccatcccccatctcaccctgcaattgagtaccatcccccatctcaccctgcaagtaccatcccccatctcaccctgcaagtgagtaccatcccccatctcaccttgcaagtaccatcccccatctcaccctgcaagtaccatcccccatctcaccctgcaagtatcatctcaccctgcaagtgagtaccatccccccatctcatcctgcaagtaccatcccccatctcaccctgcaagtaccatcccccatctcaccctgcaagtaccatcccccatcttaccctgcaagtgaataccatccccatctcaccctgcaagtgaataccatccccatctcaccctgcaagtgaataccatcccccatctcaccctgcaagtgaataccatccccatctcatcctgcaagtgaataccatccccatctcaccctgcaagtcatagccagctgattttggctttcagtttagtgtctgtatcttacaccttattttgtttttgtttttctgtggacaagtttttagttttataactaaatggagtgacaattaccatggccctctccagagtagcgtatttcttgttcatgtatgtttgttgagaggcaagggtgggggggctttgtttgtgcctcggacctgtgagatactgaaatacctggggttccttaagaattctgtacgtttaagcagatgggtatatggtaactgccccagtttgtatgcattttggccacacgcagtatacacagattttgaggagttgagggaaaagttagttatgggtaatgaaaacattttggacttgggttaaatttttccttacaagctggctggctcaatgtaatgagctttatgagatggctttttggggcttcttttttttgccgggggtaggtcctatggatggaatcttcatttttaattcttttaaggaaatgatgtgggaataatacagctgtacatataaggagagtatgggatgagtctttttgtatcacaaagccttgcatagaggatgtgtttattgtattaatgagttcactgcataaaatatataccttttttattaagtggtgtgatttttatcacaaaagcttgtctttcttggtggcttggcttgagttaaaagcctgtgtttgtgttatcccaagctttggaataaatgattgtgtcctattttgatatatggtcttattttaaaatattctttttgttgctgttttttttgcatttctcaaaacaagtagtgatggggagtgtaaagagcccttatacacagaactaataatgcattgagaagattgaatatgaaatatgctttttttttgttttgtagagccttccccaattgtaaatttgctgaaaaatgtttgtttgttcacccaaattgtaaatatgatgcaaagtgtactaaaccagattgtcccttcactcatgtgagtagaagaattccagtactgtctccaaaaccaggtgagtgagtgactgtgctactacatttgggtaaaaaatataaaatggcattttgtgactgtaaatggaattgaacaaacaaaagatggtttcagaaataattttggcaggatcagttaatccaaccagtctttaaagagcaagtgtgcctatctgtagtattccgaagtattttgactagtgaatatataaaccttaccattctaatttaaaaatggttttcactttcaaaaaaaacatcagtagactgcattaaaaatgggttttccaaacagattggagatcagtcctggtttttattttgttagcagttgcaccaccagcaccaccttccagtagtcagctctgccgttacttccctgcttgtaagaagatggaatgtcccttctatcatccaaaagtaagaacttctattttctcaaatcaatttagtgacaacatctcaatttcctcatttaacttcttttttgtcagagttactacattggtgcaaaagtaattgcgatttttgccagtaaaactattaagttgttcctcgtcactgaacctccatctggccccttaggccaagtggtctgaaactgttcaatgttagtatcccaagcactcagtggggggaagcatatctttgctagtcacattttccattattccctgcatttaagtatatggatgggttttagcgggggctggggggcagtttgaacctaatgtcagaactgagatgaagaaatccagtaggtactgcttaaaaccatccaaacttgtactgatgatggttgatgaatctccagatgtttagttggtcaaaatgaattatctccttcttgccccggtagcttgaggaccatatgaaggccttcacttgcccccatctgtaactgggcgtagatgagggtactcagtgaagagtgtaagggataattagaagtttttgtggtatgctaaactaccttttgaaattgtacttgctgtgattctttgactagaattttgtgtctcaaggttaagtccatttttcaaggcttcactagtattaaaatggtccttatagatggaatctcttactctgttaatggttagggtgggctggttattgtctcctaagttgtatgttggccaggtgaggtgggtcaggcctgctatcctagtactttgggaggtagaggcagaagtggaaggatcgtttgagcccgggagtttgaaaccagcctaggcaacatttaagagaccccatctcttaaaaaaaaaaaaaacaggcttggtagcacacgcctgtagtcccagctactcgggagactgaggcaagaggtcatgccacttcactccagcctgggtgacagagtgagaccctgtctcaaataataaaataatgtgtttacttatattagccttgtggatattgttgaagctctgttatctctattcagcattgtaggtttaacactcaatgtacaagaccggactgcacattctaccatcccaccattaatgtcccaccacgacatgccttgaaatggattcgacctcaaaccaggtaaacattcaaattcgtttttctcatgtcagttcaaattcttttttctaatttgcagtttctaaatttataagcacacaaaattggaaactagactgttactttgaatttttttctttgctgtttaattatagaaggctcctttggcaaaataatttactacatgggctaaattttacattatccagtggttacttttttaacctagattatcttgctctgttgcccaggttggagtgcagtcacactatcatagctcactgcagcctcaaacccctgggttcaatccatcctcccacctgtagctgagactacaagcgtgtgcctctatacctggctaattttttttattttaagtagagatggggtcttgaactcctgagctgaagcgatatccttccaccgtggccttccaaagtaccaggattacaggcatgagccaccacacccagccagattttaacttctcattatatactacgcaaacatatactaaggccagcaggagtatatatatgtgtactgtacttgaatttcacatccattttcttcgacattagcaactgggagatactgaaaggaagtttcaaaatattttagtgtggccagaaaatttaattacatatggtattatcttttatctacctgacataattgaattatttttaaaaatctgccatttatattgtaatcttatgaccaaatatttattgcttaaaactagtcaactttttaaactgagatatatggtatatatggatacaaagcagataattaaaacaatttttggttctgttcattcagcgaatagcacccagtcctgcctggcagaagatcatgcagtttggaagttttcatgtactgatgaaagatactctacagaacttgtcaaatctttgaaacttggaatatattgctttcataata

SEQ ID NO: 15892 - DNA, 48677 bp, Homo sapiens
atggagatcggcaccgagatcagccgcaagatccgggtgaggcccgtgccggtcgggggtgggaagccaggtctcggcgagcgggcggttgtcaggagtaacggggactgtgggcccgggtggacgccgcggcctggcctccgctggacgctcctggcgggctgcggctcctcctcgtccaggccgcctcggccctggggacatttgcggcctcggagcgtggctgcggctgaagtagccgccgggaaatggaaggacaggcgcaggcccggctggagccaccaccgcggcgcacggcgccgctttggatccgctgcgggaggtgggcgccgcggggctggggctggagctggagtggggtgcggggtggggggcggtgcaggcgaggctcctcccagcccccgcccgggggatccgaggtgcgcgcaccagcaaagtggcctcagccgctgcagagtccggtcttgttttcctagagccgcctttctcacatgcacgtttgctctttttctctcagagtgccattaaggggaaattacaagaattaggagcttatgttggtaagtgtttttttggttgttagtcttacagaatttagagtttgcagctaatagaattttagtgaatgcgtatttctcaccgtactttggacattgggagagactcccttctaccttcttcaaatcttatactccctggttacttctttatcatctttttgcaaccttgttttttttctcccaaacctccttctgttatggtgttttgaaatttagtttcctccgttaaggctctgtttgaccgaattttattttatgtttttcctattctctctctctctcattttaaattctagggacgggtctcgctacgttgcccaggctggtcttaactcctgggctcaagcaattatctgaccttagcctccctaggtgctgggagtgcggggattactggtgtgagccaccatgcctgtttaaagtttcctattcttgttactttcctcttgacatttgtttttagaactctgatgttggatgtgaatgtttgatgctttctggcatttgcttctgtaatggttcagtgagttttattttccgatctctttatgttttccctctctctctgaaacagtaaggctttttccgtctctttattcttttataatttgagtgtttactctgggtcaggtactgtgcttaactattgtatatgtattaactcaggataatccctacgagaatcctggaaggtaagtggcagtatctttgactgtgtaaacaaggaaactgaggctttgcctacttgagcaaggttttatggtttgcccccaaagctggtgcctcctataaaaataatagctaccactaatgacagtggttctcaaagtgtgggagactccaagggcctctgaagtcaaaactgttttcatattaatactaagatggtatttgttatttttcactgtggtggtggtgtttggattgtgtaaaactaatggttgataaaacttgtcagcatagtaacaccataatgaaatcatattcaaatcactccccccttgtagtttttttctttttgagccaattacacttaaaatgtcattgatgaagatgtgaagtccagggtttacaaaatattttttatcttcttagtattcagtgcgaggaaatagaaatgctcataaaacatttttattgtatactgaaatacgattgttctgaggaaaatcattttagttgagaactaagctagccacctctttcagggaacatcatttttaacttcaaagtactgacaaactggttacatacactaggatatttggcagatatttacttgaaagtgagcaaagaaaagaatccatagtctttgttgccaatcacatgtgagctttcaaatgaaaattagaattttggaaaatctgagcctgcctccatgaatttcacagcttcccagtacttaaaaaatttctgattaaataaatggtgatttaaaaaaaatttgttattattattattttttttgagatggaatttcactcgttgcccaggctggagtgcagtggcgtgatcttggctcactgcaagctctgcctcccgggttcaagcgattcttttgcctcagcctcccgagtagctgggattacaggcatctgccactacacccagctaattttttgtatttttagtagagacagggtttcaccatgttggccaggctggtctcaaactcctgaccttgtgattcgcgtgcctcagcctcccaaagtgctgggattacaggtgtcagccactgcatccggccaactcaatggcgatattaaaaaataattattttatactgcataatgaaatatatcaacgtgtcagtggtttttgtagctaagtgaaccaatcttttctaaataaccaatgcataatattacaaaattatgcagtggattaaagatttatttaaactctggggtgggtcagtggatttttgtgcaacagttcaaaaaggtcattgacgtatttgacattccacgttgctttaacatttaataagctaccacttgtttagttttggtgtagtgtcacagaagaatatccaccttatctgaaaagactatcagaatactcctttttcaactgcatatctgtgagaccagattttttcatattcttcagtcataagcacatagaacaagatatataaaaatatgaaacaaggccagtctttgcagtaaatttttctttttcttttttttgagatggggtctcactctgtggttcgggctggagtgcagtggtgcaatcttggctcactgcaacctccgcctcccaggttcaagcaattctcctgcctcagcttcccgagtagctgggattacaggcacctgccaccaccccgccccccccccccggctaatttttgtgtttttagtggagacggtgtttcaccatgttggccaggctgatctcgaactcctgaccttaggtgatccacttgtctcagcctcccagagtgctgggattacaggtgtgagccactgtgccttgcctaaatttttttttggaaaatttaataatgttacttgtgttaatataattggatttgtgattaacatgtgatggatttattttttaatgaattaataaatactttttaattaaaaatgatcagttctaattttgaacaccataaataatagaacctgcataaaccaaagaaggggcccaagaccaaacagtttgagaattggtaatttatggagtacttaccaccatttgctgggcactttcataaacgatttgttgtcaggattgttggaagactaacagatgagagaattgaggctcagagaaaataaagctgaaccaagatttatttattcttttattctttcaacacttgaactgcattttttatagttttctttgaaacaaaaaaagtacttctgaaatgaacctttctgcctgcatagaaatattacaagtatttaaggtattaaagaaatttgtcacagcatggtggttcacgcctgtaatcacagcactttgggaggccgaggtgggtggatcacttgaggtcaggagttcgagaccagcctagtcaacatgctgaaacctggtgtctactaaaaatacaaacattagctgggtgtggtggcaggtgcctgtaatcccagctactcgggaggctgaggcaggagaatcgcttgaacccaggaagcagagcttgcagtgagccgagattgtgccactacactccaacctgggagacagagcaagactctgtcgtaaaagaaaaaaaaaaaaaagagaactggaatggagttttgagggtcagagattagagttcctgataacagcttttgcttccttatcttcttagtgaggtttttgtttttttgttcttttaaatcctagacctcactctcataatcactgtaggattaccactaggagggtgttttttggcttcttttatttattttatttatttatttttttttgagacagagtcttgctctgttgcccaggctggagtgcagtggcaggatctgagcgcactgcaagctccgcctcctgggttcacaccattctcctgcctcggcctcccgagtagctgagactataggcgctcaccaccacacccggctaattttttgtatttttagtagagacagggtttcactgtgttagccaggatggtctcaatctcctaaccttgtgatctgcccaccttggcctcccaaagtgctgggattacaggcatgagccaccgcgcctggccttttttcttttttttttttttttatcctagacctcacccttataatcattgtaggattaccactgtgagggtaaaaccgtgcattgagttgacattatttaatgttaaaattgatttttttaaatgatgtggagcttttgggtctatttgtttattcgatgttgctacaagtttgttactgtgagtaattgaaacctgcctttagcaagggtaaagatgttcacttgagaaatgagtgttattttgaaactttgcaaattaaaactaaacaaaactcaattctttttcttggggaatgttcaaatatttcccataagcttctttgaaattaataagcattattaaaaagattcaaggaagtgaatgcatgctcaagtttgaccctataattcagaatgtttagttttgtaagtatcaattattcttaatttccattcttctagtatttgaaatacctgtggaatgaagagaaaaaaattaaagctaagccatcttgtccaatgtaattccagtagagctctgcgactctaaagcttagagctacatctatattttcaagcacatcaactttaagaagaaagttttgaggaaacaaagttttgatctacctttccttttaaatagatgaagaacttcctgattacattatggtgatggtggccaacaagaaaagtcaggaccaaatgacagaggatctgtccctgtttctagggaacaacacaattcgattcaccgtatggtatgtttctgaatttttgtgcctcagaccaaagtttggcacaagcctgagttgatattctgtccaaagagaggttcttgacacttgagttaggtttactttggagaggcagtttgtgagtgatgagagcacagcctctgtattagtccattttcacagtgctatgaagaaatacccgagactgggtaatttctaaaagaaagaggtttaattgactcagagttccacatggctggggaggccccaggaaggggaagcaagcaccttcttcacaagtcgacaggaaagagaagagtgaaggaggaacttccagagacttatataaaatcatcagatcttgtgagaactcactgtctcttgagaactcgggaactcactgtctcttgagaactcactatcatgagaacatcatgggggaaaccacccccatgacccagtcacctccctcccttgacaggtggggattacaattcaatataagatttgggtggggacacagagccaaaccttatcagcctctgaagccagacagccaaagttgaatcctggctgtgtcttgccttggtttctctagctataaaatggaaatagtacagccacttgctttataaaattattattgaggatcaaatgggctaatatgtgtaaagtacttataggtgtccctagcattttcctaaggaattcttagtatatgtcggctatacttaatatgtttcttttgtaaacttctatatctttttttttgagacagggtcttgctctgtcaccaggctggagcacagtggtacaatcatggctcgctgcagcctcgatctcctggtttcaagtgatcatcccattgcagtcccctccttcctgaactcccatgcctgactaatttttaaattttttgttcagacagggtcttagtatgttgccctggatgctcttgaactcctgggctcaagcagtcctcctgccttggccttcagaagtcttggggttataggtatgagccactgcacctggccagcttctgtatcttatagttccttttcccccaccaaaaccagttacagatgtttttttgaactgggttggcttcttacattgccttttacaatgagttacctttagagggcaaggttttctgtttctcacttttctgtttcttactttttaagctttttgttaaactcacaccttcattttgagtaataattgtagtgtaatgttacagcatattttgagattataagtttttttaagtttggaattttaaaataggcaactttgcttttatacataaattactgttatatgcctttagttgagaatactgactagaagagtaagattcaacttaagatgctaggtcctggtaccaggtttgaggtaaagtgaggatgagggctggaggataatgatgtagctgagaatagacagacgaaatactttattaggcttctcaggctaggaactaccagttaccgtgaaaggtgatgatgtagcagaagtgagcaagtggcctgccgaatttgagtgcaagaggaggcactgagtggggagatgagcctggttaagttcttgcctttataccaaaggtcgtcttcaaggtgtttttgcccaagtaggcaactgtatgcttatcaaccgtcttgaaattctgcacagaattctctgggtttatacattgcacaaatttgaagaacattgtatagtggtcatcagttgttatgatacactgctgcctcactgtgggtgacccaacccatttgttacaatttgtccccagaggttattccctcccagccccccacaaaaaaagactgtgggtcttttgactgggaaaattaccattattgtgagtactatttttttttctaaagcgaccgagtagatccttttctccgataacttgatagaatacttagatttttaaaacagactaccaaatgaatttaaaaccaaattaattcaacattctcatctggccataaattgagttctttaacatgtagtgaagcaaagggtgatgtccccattttggcactttgctttcttaagttagtgttcattaacaccagccccaaacagactattgtgattatttggagccttgaagtaattgtgtccgtggggacagtagcatgtgactagggttctcattgaaacatgaggtttctggcatattttgagaggtactgggaagggatgtaaggcaaagtacctcatttataactaccaaaacaggttatgttacaagcaagattacagccttacagcatcagttttgaaagtaatagagtgaaatgatatagcatagtttgagattataacttgttttaacctctcagaattaagttgtccaagacaccatctagtttaagcagttaatataagctgcttaaatggtggtaataataagcaatattacatgtttatgatacttgttttactgtaagctacagtaaatctttagtacttacaaacagggtgacatattttgtagactaagactggtcagatgatattctttcccatatttttgcagaggctagatgttgaaaacagtgaagaaaaaaatacaattttttattgacttctgtaggatttatacaaagcccttttttaaaaatgtgaagtttgaaagttcataccatttattcactaaatacagtttatcagtatttatctcagctaggtgcggtggctcacgcccgtaatctcaacactttgggaggctgaggcaggtggttctctcaagtccaggacttcaagaccagcctggacaacacagtgaaaccccatctctatttaaaaataataaaaatataaaaaaatttaaaaaattatctctgaatataatgtcataaatttagagtgacagttgaaatgaaatctttcttaacagaaggtttatttttgttttttgtttttttcctcaggcttcatggtgtattagataaacttcgctctgttacaactggtaagattcataacttttttttttaatttctgcttgctatggcatatgatttgtttctttctaaagtcatagtgctttgggaaaaacccatcaatttcaaaacggttcatttgaacttttttagaaagcacatacttttatgaacttaagagcagtaaatttaacataattcaaagataatttaagtgtgggagagggagcagtgcactttatccgaaggaaataattacatatatgtgcaaagatttagcctcaaggatatttcagtattttataattgaaaacaatttaaaagttcagtcataataaacgaaattgttgtattaccatgtgtggaataatatttaactattaaaaataatgttgtggaagaataacagaatatacacgcataagatacatgttttaaaaaatgtgtatatatgctcttcccccgaaaaatcacctttgagataattggtgatttttattatatttttaaaattttctacaataaacatactgcttttgaattggtgatgaggaaggaaacgacttaaagtaataaaaatagatggccgggcacggtggctcacgcctgtaatcccagcattttgggaggccaaggtgggcggatcatgggctcaggagatggagaccatcttggccaaccaacatggtgaatctccgtctctactaaaaatacaaaaattagccaggcatcgtggcacatgcctgtaatcccagctacttgggaggccggggcaggagaatcgcttgaaccagggatttggaggttgcagggagccgagaacgcgccactgccctccagcctggcgacagagcgagactccatctcaaaaataaataaataaataaaaataagaaataaaaatagattaaaaggactgtatttttcttttcagaaccctctagtctgaagtcttctgataccaacatctttgatagtaacgtgccttcaaacaagagcaatttcagtcggggagatgagaggaggcatgaagctgcagtgccaccacttgccattcctagcgcgagacctgaaaaaagagattccagagtttctacaagttcgcaggagtcaaaaaccacaaatgtcaggtaagagtctggtgtagacctgctgggggcagatggctctgtgtatgtgacatttatattagtttttatatctttcagtttgctgttctcagcaatttttagaaacaatgaagtgatcgtgagtagttttttgaataaaataatggataagatctaagtatgattatcttttatcacaaatttagtaaatcaaagttgaaagaaagtgcaatttcaaagcagttttgaatggaatatgtaaagggagtatcctcagttttttcattgaaatttttcaagtaaacattctttaaagatttggtgataattgccctaatttggctgtaatacattttgttgttcttttaaatagacagacttacgatgatggagctgcaacccgactaatgtcaacagtgaaacctttgagggagccagcaccctctgaagatgtgattgatattaagccagaaccagatgatctcattgacgaagacctcaactttgtgcaggagaatcccttatctcagaaaaaacctacagtgacacttacatatggttcttctcgcccttctattgaaatttatcgaccacctgcaagtagaaatgcagatagtggtgttcatttaaacaggttgcaatttcaacagcagcagaatagtattcatgctgccaagcagcttgatatgcagagtagttgggtatatgaaacaggacgtttgtgtgaaccagaggtgcttaacagcttagaagaaacgtatagtccgttctttagaaacaactcggagaaaatgagtatggaggtttgtatgtacttttaaattctggcttaggctaaaaatcggcagttcttgataccaaataatatatgaagtaactaaacacatattccaaggctgggcacagtggctcacacctgtaatcccaggactttgggaggccgaggcgggtggatcacgaggtcaggagattgagaccatcctggctaacacggtgaaaccccgtctctactaaaaatacaaaaaattagccaggcatggtggcaggcgcctgtagtcccagctactcgggaggctgaggcaggagaatggcgtgaacctgggaggcggagcttgcactgagccaagatcgtgccactgcactccagcctgggcaacagagcgagactccgtctcaaccaaaaaagaaaaaacaaaaaacaaaaaaaacacatattccaaatttattttattttattttactttttgagaaggagtttcactcttgttgcccaggctggagtgtgatggcgcgatctcaactcactgcaacctccacctcctgggttcaagcgattctcctgcttcagcctcccgagtagctggtattacccgccaccatgcctggctaattttttgtatttttagcaaagacagggtttcaccgtgttggccaggctggtcttgaaatcctggccctgtgatccacccaccttgatcttggctcactgcaacctgtgcttcccaggttcaagtgattcttctgattcagcctcctgaatagctgggattacaggtgtgtactaccacgaccagctaatttttgtatttttagtagagatggtgtttcaccatgttggaccaggctggtcttgaactcctgacctcaggtgatctgccctccttggcctcccaaagtgttgggattacaggcatgtaccatggcgcctggccccaagtttatttttaaattgttttatctgctgtttctcatgctataccagattttcttccccatggcttgctcctagagttcttttgtatcacatctgtatacctttttgggatttccagcatttgagatattaatcttaaattaatttggggggtttcaatcaattttagattgttcatggtaattgctagtgagcaaccaattaactctgttttattagtttcctcaatagcactatatgcagctgttgataaaataaatgtaaagttctaatttttgttttagctaaaggttgactgttagggataatatttatatttatagtatttatttatttatttattttgatacggtgtctcactctgtcgcccaggctggagtgcagtggcatgatcttggctccctacatcctccacctcccgggttcaagtgagtcttctgcctcagcctcccgagtagctcggactacaggcacatgccgccacgctcagctaatttttgtatttttatagagacagggtttcaccatattggccaggctggtctcgaaatcctgaccttgtgatccgcccacttcggccttccaaagtgctaggattacagatgtgagccaccacacccagcctcatatttatatttttacataaaaccaagaaatactctgtgaatttctcatattactgtgtactgtttttttcttaaaatggaaacattttgtggtagaactcttgttattttctgagattaggtaagcataaattttatctgattgcaggatgaaaactttcggaagagaaagttgcctgtggtaagttcagttgttaaagtaaaaaaattcaatcatgatggagaagaggaggaagaagatgatgattacgggtctcgaacaggaagcatctccagcagtgtgtctgtgcctgcaaagcctgaaaggaggtaccttgaacatggctgtaaattaatctttaactgccttggtggagtcttcctgatttattgaagagaataatcacgaaaataatttttgtttgttttttgagacggagtctcgctctgtcaaccaggctggagtgcagtgccacgatctcggctcactgcaacctctgcctcccaggttcaagtgattctcctgattgagcctcctgaatagctgggattataggtgtgcactaccatgaccagctaatttttgtatttttagtagagatggtgtttcaccatgttggaccaggctggtctcgaactcctgacctcaggtgatctgccctcctcagcttcccaaagtgttgggattacaggcatgagccaccgcacctgacataaatatttaatgtaataccgtgtaagacttttccattgggttttgagaaacacgttaatgagagaaattgcttaacattggagaggattgcagagaatattgactaatatggtggggtgaggaggaacaacatcaattaagattcagatttattatttaaaaaaactaaaaggggcctaggcatggtggctcatgcctgtacctagcactttgggaggctgaggcaggaggattgcttgagaccaggagttcgagaccagcctgggcgatgtaatgagtctttgtctcttaaaaaaaattaaaataaattagttggtcattgtggcaggcacctgtagtcctggactggagaggtggatgtggaagcattgcttgagcctagaagtttaaggctgcagtgacatcacactccatcctgggtgagagagtaagagtctgtctaaaaaaaaaaataaggttccagtgtagttggcattttctaaaaactgcagctagtctgtttaaaacctagagaaggttgtggtaaaggcataatagatggctggcctgtgaggaactgaaatttaaagtttaataaaaatacctttcttaactcttttagaccttctcttccaccttctaaacaagctaacaagaatctgattttgaaggctatatctgaagctcaagaatccgtaacaaaaacaactaactactctacaggtaatttaaatgtattatgtttacacttggtaagacatttctgtaattcttgagtaaggtgaaaatgattgctccttaaattgtaaaataaaggtgcctgtcagatgtcaagaccaagatgaggttcccatatagaaaaatggctttaaaaggaaattgacaagtttgagaaacttcgccaactgttattggactgtagtttttcaagcaccatataatgccttttatatctttccaatgtgtgtaaaatatatagtacgtaaatattttgaagagaattttgatgaagtaggactttcatattagtagcattagattcaacattagatatgaatttacgatgtgtaaaggggagtacaattggacaatgataggtatctgaagttatagaaatttgttaaacagtagtatataaacaaggttggtttcttcccttttggcggaactcattagtagaatataaggcagagaattgactcatttgtgatgttcctgctccaattctagtggaagtactgaataattttatgagagaatataaaagtattacgttttcaaaacaggagatgaatcagctgtaagctggtcttacggaaagctgattctgaaatgcaaacaactgatgggtgtcattttgtgttgtcaaattctgtactctctggccgacctgttgtagccaatgtgtaaacttgtgttaagaagctgatggtaatgagctactctaaaaagatttaagttttgctgtggatttggtgggtgtacttacagcattgccctgcttatccactctctcgcttttttttgtgaccccccttcctaaaatgaggtaaactgtagccatcagtttttttatttgttttctttttttgaggcgaagtcttgctctgttgcccaggctggagtgcagtggtgtgatcttggcttactgcaatctctgcctcctgggtccaagcgattctcctgcctcagcctcccaagtagctgggattacaggcgcccactaccatgccaggctaatttttttgtatttttagtagaggcggggttccaccatgttggccaggctggtctcgtactcctgacctcaggtgatcacctgcctcctcggcctcccaaaatgctgggattacaagcgtgagccaccgcgcctggcaccatcagtttttgatcctgatacttgtctgtcctcttggttctcctcatccctaatttaaccttgaacacaaaattcaacaggttttggcatatagaataaagattatcaggcaaaggcgcactcttgacctaatgatatatctacatttcatttcctgatctatcagcaatattaattgtctagaatgatgagaagtttagagaagttccatgactttgaaattttctttctttacctaggttatctaaattacaatttgaaactcatataagatcatgaagctaagcttaaataaaccgcattttgttgaaaatgaatacatatgtactatattgtattcatggtatgtggttgtatggatattgtttacatatgtttggataaataggttcaggtatctatctcagtaacgtaagaaaaaatgaatggtatctatggattgaactcctcatatatatgttcttttcttttctttttcttttttttttggagacagagtctcactctgttgcccaggctggagtgcacagtggtgcaatctcggctcactgcaacctccgccttccgggtttaagcaattctcctgcctcagcctcctgagtagttgggattacaggtgtgtgccactatgcccggctagtgtttgtatttttagtagaaacgaggttttaccatgttggccaggctggtctcaaactcctgacctcaagtgatccacccaccttgcctcccaaagtgctgagattacaggcatgagccactgcgcccagcctgaactcatatgtcctaaaccaaaggaggcatttatatttaatatgacatagtcactgtggagttttgacgtattactgcatttgtatttctatcttttttgcttttatgtgaaagttccacagaaacagacacttccagttgctcccagaactcgaacttctcaagaagaattgctagcagaagtggtccagggacaaagtaggacccccagaataagtccccccattaaagaagaggaaacaaaaggagattctgtagaaaaaaatcaaggtaataacttaaatgatgtttcactctttactacagttttttcatgaggcattgaatattttccaatggatttttatgaaatattacactatgaaaaaagtgatgattaagcccagaaatagaatgagaagaataccatgaggaaggttcataccaacacttcagaaaaaaattttttttttaaagaggtagggtcttgctgtgttgcccaggcagtcctcaaactcctgggctcaagcagtcctcctgcctcagcatccttagtagctggaggtgtgtacaagtgtgtgccactgcacccagccctttctagaaatttttgaaagtctttttattgtggaaatttttaatattctcaaaaatggaaaggctagtacagtgaactctcatgaacccagtcattaagccttagttattatcagaattttgctggtctttagatagctccttcttaaagatatatttatttctgcattctttctttttctctttttgttgatcctgcccgtttacctgaacttgaaattttagttacctttaaatctcccgtctcttaagcatcctgtctctgacctcccatatgtgtcccagcaaccctaatttatcccctcgtgcctaacatacttcagtttgcttccaggttttttttttttttttttttttttgcttttttctcagctttctcccccaattcctatacaatcttttgactttgaaagtgtgtctctcatcttctgactcctttgtgaaagtatctctcccctcctcctcattacccagaactaacgctattagtttggacttttggtgtctgttatctgacccctgggcctgcacagcccttctccatgactcttcagaccttttgtctcttttgtcgtcaagaaggattcttttttcttctgtttctttttctactaagatttgaattttaagaccccaccaaaaaaatctatatgcttattatgttatttctcacatacttttcaagaaccttggaatatattttttcatttcttcaaaactgtcctttaaattgttccaggtttcatgaaaccttatgatttcagaattgtcaattctgtatttgtttcctcattgtgtctctttaaaaatttttgactgtattgttcagtttgccatgacagcgttatatactattctgataattgataggcctgaggacaagacctgtttggtccccaaacagcagataggtaccaattggaaaatgtgaatgggccaaattgagaagaggagctgaaactgaggagggattttgctcagtgcagtggcagatgaggctgatctaaaaggactgcagtggtctactccctgtggagtctgtagtgtgttgcaccaaggttttcttcaaacacaggactctacgtgagagtcttggagtggaatcagatggagcagggaaacagacaatagagaaaaggaaagaatgtcagataaaaataggagaggaaaacaataggaaatctcaaagcaaggtgccatattttttaacatcacaaaatcaacagaagaaggttgttgattctgaagttagaatagctatccaaagcaaactttcccctaaaatgaacaacagaaaagtatcaaggtcaagtcctgtgccgaattaaaagataaaagggaataaaagacaaaacagcattgtttcaatgaaagcatgctgaaaggtataccaaaaagaaatacaatttcaaagtgagctagaagacattatttaaataatacaagacaaagccaagaaaaacataaaacagaagaactttgaggctgggtgcagtggctcatgcctgtaatcccaacactttgggaggctgaggcaggaggatcacttgagactagcctgggcagcatagcaaaaccctgtctcgacaaaaaataaaaatattagctgggcaaggtatacacctgtagtcctgtctccttgggaggctgaagtgggaggattgctggagcccgggaggctgaggtgggaggattgctggagcccaggaggctgaggttgcagtgagccacgatcataccattgccctccagggaggctgaggtgggaggattgctggagcccaggaggctgaggttgcagtgagccatgatcatgccattgccatctagtttgggcgatagagtgagactgtgtctcaaaataaatgaagactaaattagaaagaactcgaaagaattagtgcgtcttaataaaataaaacatgcgtgtaatcccagcaatttgggaggccaaggcgggaggatcacttgaggccaggagttgaagatcagccagggcaacatagcaaaaccttatggctacagaaaacagcaatttaaaaataaataaaattaaaacatcttcagagaaattgaagataaaagacaagaacattttaaaagtctaaaagggctcatgagaaagtggcaaatattgataataggcaatagaaatacagtgtttttatagtaggaatctccaaagaaacaatattcagaggaacagagcaaacattaactgtctttcaagaaaactttcatgaagtgaaaacatgtttgaaactgttgtctgaaaaattgtacagtatacctgagaatatttacccagaaccataacactaagatgtattatataattaatgaaattttaaaaagaaaaaaaatgatttggacattcaggcaaaaggggcacatgacttagaagaaaaggaaaggtagattatcatcaaacttttcaacagcatcacttttgtgctggaagaaaatggactagcatatttaagatactccagaaaagaaaatgtgagccaagaatttaatgtccagcaaaagtgacctttagaagtgatccagcaccaactgttatctatatgcagaaattcagagactcattcccatgaacttttcttaggaaatctaatggaggatgagcttcagacaagtaaaagcctgttgtcctgaatttacattggaaatgtttcggaactcacagtgtattttatatataaatacatttttttctagttctgtctactagaaggcatagaaacattcatcaacccttagcatcatctgtagttcccagattgtggtcttggaatacttcctatttaaaaaactaggcttcttgggctgggtgcagttgctcacgcctgtaatcccagcactttgggaagccgaggtgggcagatcacctgaggtcaggagttcaaaagcagcctggccagtgtggtgaaaccccatctctactaaaaatacaaaaaaattagctgggtgttgtggtgtgcgcctgtagtcctagctactcgggaggctgagccaggagaatcgcttggatccgggaggcggaggttgcagtgagccaagattgtgccaccgtactccagcctgggcaacagagtgagattccgtctcaagaaaaaataaaaataaaaaaacaaagaactaggcttcttgagaaatgtctttttccaggtctggggcaggaaatgttaacatgatcctggaatggctcaacatcccagatagcaaagaagctgtcaatgaatggtagaccacgtccaaaggatgcaggcgccaacttagaggtttccattggccaaaaatggaattatttgagattcagtaggtgtaaatatcgcggtgaattaaagcccatttaaatccacaatttcataatgacattttaaaaaaataagctctaactagtcaccttctggaaggtagtagataatcattcattgtcttgaaaactgggtaaataaaataattgaacatttatgctgtcttttctgtgagaacgataccactgggtaaccccataggacaggagttggcatctgttggaaccaaaccgtgcctattcatgtatgtattgtccgtggctactttcatactacagccttagttgaatagttgcaacagaccatatagcttgcatagcctaaaatagcctaaaagatttgccaacctctgatatagtagatgagagaaacattttcttttaaaatgatttcagctgataagagaacaagatggtaggattagagttatgcttttaagagtgaaaaccagttgttttgtgcctcttgatacaaaagaacagaacttttgtcttgccaaaaatgtaaacctaagtcatcaagctcccagtccagcagtcagtttgcaagaagttgcagaggccagaggagtatgttggttgagcttcaccatgagtgtgcagccggaaaaatagtgtttgggacactgtgggttgaatagcctgagaaattgagattaaaaggcaaatcaaaggaaaataaaaggagcaggattaaattgtagtggctagggatacccagtgtgtgtgaaattataaagaacctctaggcgttaatataaaaagcacatagtggttgcttttgaagaggaccgataaagatggagcacacagagaggcttctggggtggcagatgacgttctctcttttgacttggatggtagtcagaagggtgttttgccttacaaaaattcattaagctatatgtttgtgtggttttctatactgtgttttaaaaggggataattgaaatggtgtcaggtacctttgctgatgaggagtttggtattactagatatattcacaagtgtgaagtgatactgcaagcaactgttatctgttaatgtggttactcactgttgtacggtataatctggggcaggtttttaaaatataaacatgcactcgtattggcataagttgttaattttttttcttcttttgtttgagcagatagcattctctcatttctctggtgtctttatttttactagcgcacccacctcataatatgtgtactttttgctttttgtcttgccatcagtctgtcactagaagtttattttgccgatcttttcaaagacttaacaacattattctggctttattgatttttttttttttttggtgtttttgttttctatttcattgacttgtgctttttttttattttttttttttaagaggcgaggtctcactgtcacctaggctagagtacagtggcacaattgtagctcactgcaacctcaaatgcctgggctcaaatgatcctcccacctcagggaccataggcacacgccaccacgcccagctaatgtttaagtttttttgtaaagatggagtctcactatgttgcccaggctggtctggaactcctgagctcaagcagccctcttgcctcagcctcccaaagtgctaggtttacaggtgtgagccactgcacctggcccgacttctcttttaatttatccttccatattttaaaaattatttacctcaggctgtcttcttctcaaatgtaagcatttgagaagaatacatatgacaggttttaattcatcatgttttcattatcagagtgtctttaatttccattataattttcatcattgaaagtgtgttttctatacagtatttggaagtggtatgtgtttttgtcttttaatcctttttattatagacacctgacttaattgcattgtggttagataatgtaatttttacaatgcatagtttttgaaaattgttaacacttgcttagtgcataatcaagtttatgcatcttccacatgcattttggaagaaagtggactaattattggatggggaattttacatttattcagtagataaagctctactgttaacattattcaaatcttgaccttgctgagtttttgtgctgcttgacttaccacttgagaaagggtgttgaaattgcccaacatgatgacagatttatcttaatttctcttgtacttatatcaagtttttgctttatttttaggctgttatatactattaggtgcatacatatttaaatttgttatatcttctctgcaaattgaatcccttatcttgatttatgaccctctgcaaaaaagatgtttttatctcaaagtcagttttgcctgatattaatatagccatttaattatatttgctttatatatctggtttccctgcctttgttttcagttttctctctcatgctttaggtatatacagttgacccttgaaccagacaagtttgaactgtgtgggtccactcatacacttatatgtggatttttgaaaataaatatattggaaatattttttgagatgtggcaatttgaaaaaacttgtagataaactatatagcctagaaatagtgacaaaattaagaaaaatttaggtatgtcatgaacacataaaatatatgtagctactagactaacatttactatcttaaaacatacacatctattatgaagtttaatttatcaaaatatatgcacacaaacacagactttacatgataccgcttgtagttgagagaaatgtaagcaaacataaagatgcagtaatagctacataagatttactatagtacatactgtactactgtaataattttgtagttacctcctgttgctttatggtaagctaaggtgttttgagtgtccacttaaaatgctgtgtgatgcaaccatctctgcgacagttcagctctccagtaaattgtgaattgcagtgaaaggtgatctcgcagttcttgcatatttttcatcatgtttagtgcaatactgtaaaccttgaataacaccaggggacccataatgtgctactggtgatgctggacatgctcccaagaagtagagaaaagtcatgacattacaagaaaccattgctcagtatgtaccaaagatacatgttacaactgtggctgcagttattcaccatttctggataaatgaatttaacataagaaccatggttaaaaaaaaaagaaaaagaaaaaaatgtatgaagctgccactgcagctacgttggcaacagtaagtagttaaatgtttgggaagtcaaaagttgtatgtgggttttcaactgttgttgggggattggttcccttagccctcatattgtttaagggtcaactatatattatatcttaaatattataaagctggattttgttttttaatctcatctgagtttgccttttattggagagtttagaccagtcacatttattacaattactggtatagttggattactttctgtcatcattgctgatttgcatttgcctgcttttctgttttttctcatgttttttaaggttcattaattactgttattgttgacaaccctaaccctggttctacaattttaaactagtttactgtttaaaccttccctttctgttctttttttttttttttgagacggagtctcactttgttgccaggctggagtgtagtagcgcgatctcggctcaccgcaacctccgactccttggttcaagtgattctcctgcctcagcctcccaagtagctgggattatagacgcccaccactacgcccagctaatttttgtatttttaatagagacgaggtttcaccatattggccaggatggtctcaatctcttgatctctgatcccctgaccttgttatctgcccgcttcagcctcccaaagtgttgggattataggtgtgagccaccatgcttggcctcatttctgttcttttagtcgttaccagtgaaattttaccacacaaatttaatttagtattctaaaagttaatatcctgaccccactctcaaacagtaaaaggacttttgaatacctatgaagagcttcagtctttatcctcctcatttacttgtttccagtgtttcaatttgatcttttttaaaatgcacaagttgggccgggtgcggtggctcatgcctgtaatcccagcactttgggaggctgaggcgggtggatcacctgaggtcaggagttcgagaccagcctgaccatatggtgaaaccctgtctctactaaaaatagaaaaattagccaggcatggtggcacacacctgtagtcccagctactcaggaggctgaggcagaagaatcgcttgaacccaggaggcagaggttgcagtgggctgagattgcgccgctgcactccagcctgagcgacaaagcgacactccttatcaaaaaaaataagtaaaataaaatacacaagttggacaacatttttgtaattttttccaggcaatgttttttgaggtttacctcctgtttatcattttacttattcttaacatctctgagtgttatttggggatcattattttccaatattttgaagtatttttgaagtatttttttggaagtttcactgaaacatgtctgttggcaatatattttccaagagtctattcacctgtgagtgttttctttctttgtgttcttgtgcagtagttttgctggatacccaaatctaggttgttagttatttgctctccacaccttatatatattattatcccactgtcttctgctttccattgttgagtggacttctatcattctaattgtctgtcgttcctttgtaggtgatctgtcctttctctctggctgctttcaagatcttctctttgtgtttgatgttctgcagtttcactacgatgtgtctaggcgtggatttccttttatttttcctgtttggtataatgtatggaagcatcccatatatttgaaataaaatgcattatgaaatacatgctcaccatagaaaatctggaaaaagaaagcatatcaatgtaatatctcctgatagatgagaaaataatcaaatagtataaaaaagattaaaaataaaaagcaacattccttacttcattcttctctatactagtcccactccgcagaatcccccacttttaaatgcttctgtttctttctccgtgttgtaataatatgctttatactgtttcttcattgaccaactagatagtacctgttgatttcttgctgtatgtcaggttctagcccatttatacttttcccttgcttccaagctcatacagcaaaatcaatttttaattcatttattggttactttagtaattttaagtagtaacttaaatatttcttgtctggttatatttcagtatattttgacttctgaaagatatgtatccttcaattcctttttttttttggaggtagagtctcacttttgtcacccaggctggagtgcagtggcgtaatcctggctcactgcaacctctgcctcctgggtttaagtgattctcctgcctcagcctccttagtagcttgggactacaggcacaccctgccacacctggaatttttaataaaatttttagtagagacagggtctcaccatcatgcccaggctggtctcaaactcctgagctcaggcagtctgcccaccttgtcctcccaaagtgctgggattacaggcataagccaccatgccaggcctctctttcaagtcttatattttctttcttgccgccacctacattctgtcctgcctccaccttctaaattgtcacctgttcttttatattgtcaaagctgatcaaatttacattttgttccctactttagttaagacttagtcgattgactctaagttgagaaacagtaagcatttacactgttaagactatttagtctgggcatggttggtggctcacacctgtaatcccagcactttaggaggctgaggtgggagatttgcttgagcctaggaatttgaggccagcgtgggcaacatagcgagaccctcatctatatatatattttaatgttttttaattagctgggtgtgatgatgtgcacctatagtcatggctactctggagaattgcttgagcccaggagttcgaggttacagtgagctgtgattgtgccagcctgggtgacagaccaagaccctgtctctaaaaataaaaaaaaaattttaaagactatataaatattacaaggccaaatttacattctgtttcttgtacagttttgtgtgggaactctctagagtttttttaatttttcccccttttttgtttcccttaggttcttcttttttcccttctttcattgcctacctgtactgtagcctaaaagtcttatcactctgtgctttgaaatctttgggtttcccactttttcttaggtaccttcctcctggagcctctctcctccttttctgacctcactgcttgctctaggcctgctcaaggccatcatcccgaggcgccctcctcccctgagtcggctctgcaattcctgaattccattttgtcttctcagtgcatttctccgttttgtaatcacgtcacaaagaaactccttaagaaagtatagaaggtaaattttctgagttcttggaaatctgaagctatccttgtacttgtttgatactttgactaggtacagaattataggttgaagtcattttcttcagaactttgaaggcatagtttcattatcttgaggcttcagtgttgatgctgagaacttggttgcccatcttattccattgtgtaatacctgggatttttttctccgggaacttttttttttctatgttcctggtgtctgaaatttcactgtggtatgtctagatgctagttaggtacattaggtacccttttaatttgaaaattcattctcttccgtgtgggaaatactcttgcattatttgttttaaaatttgctgtccttgttttcattgttctctggtggaaattctgttagttggatgataagcccttactttaatctgtcagttgtatattttttctctcttgatttttgacttgatcttgttggtctactcttgaatacttgcttgacttgatctttagtctccttactgaacattttaaaaatgtaggcaagcatattttttaatttccacaaactttttcttgttctatttttcatagtatcttactttgtggatacagaatcatctcaactgtctgaagatcctaattaaagggattttttttttcttttcaaggaattcactcttgtcttctaattaatggagtcagagtcagattttatgctttttttcttgctctttcgattatggaatttttttcaaaaacatctgcagatagtggttcctagtttaaggaaaggtagtgcagaggcttacctagaattgtgctgtgggctgagcttttctgcaggcaggtttagctttcaatgaagcagacaaggagctgcaattggccttgcagttgtagaggaatttcttgggggagcaggttggtatgcttacactcctactggttgtctattaaaaatattaaaattttgtcttttaaatgtctgtctctggcagtaccattcacaagccttcttctctgccttacatccttcttggtttttactcattgctgcaatctctcacagttggatggccctttgtttcatccaaattcaaggcttgatatatcatctctgcactgtgactctcacatttttatatctccagcctggaccttgccctgaattcctcatttctgtccaaccactttatatttcttcttggaggtgtaataaatcatttcaaacttgtccaaagctcaactatgaattttcctctcctgtctgttcttcctgtagtcttcctcattttagtttattggtgacttcacctttccagtttctgagacagaatcctgttgccattctttttttctctccttctcctttccttcctcttccctctctacctctgtctccctccttcccttgttccacctgtcagcctctacctccagatttatagaattcactaccgtttatcacttctgcctctaccacccatcaaagtcactgtctggccgggtgcggtggctcatgcctgtaatcccagcactttgggaggccgaggcgggtggatcatatgaggctaggagttcgagacctgcctggccggcatagtgaaaccccgtctctactaaaaatacaaatattagctgggcatgatggcacatgcctgtagtcccagctactcaggaggctgaggtacgagaattggttgaacctgggaggcggaggttacggtgagccgagatcatgccactgcactctagccttggtgacacagtgacactctgtctccaaaaaaaaaaaggcaaaaaaaagtcaccgtctgtgatttgccttggttacttgattattggaatagtgtgttcttacaaggtgtgcctgctttcaaacttgccttccttcagtccatcccacacagcagcagcagtgatcctttacactgtaaattagatcatgctactttgcagcttagaaccccccaggggctccctgtcacactgtaagtcacagtgttctgccttctcatcacccacctgcctccctctgctctggctccccgtgcttgctgctgctcctgcacactggcctgcttgtccttcaggacgttggaagagctgcgcgtctcagatgcttttgccctctcctgagaatgtttactttggatgttctcatatctcatccatgtgtcatctttgaggccttctctggccccatccccacactccctcttttctgaagctttatttttccccataacgtttgtcaccatcaaatacatattttatgtttttgtagtttaggtatttttatccgaacgtaggtctttatgttttaacgtgaattgttttcttttagcatgtatttttttgggggtcttgagagctacctccttccccgtctcaacagagtctgtcctttttgagcagggatttatgtgtttgttctgtatggctgttactgagtgcccagagcagtgtctggcatatagtagcaggagctcagtcagtgtttgttgtctgagtaaatgtcactcctgccttgcatctaacctgcagttttcacaggggctcatttgtggttttgcctgctgtgccttacagccagtatttgtccatatattttctattacccagagattgttgacatctcatctgctgcaccttgtaacccccatctctaaaccagtgatctccatcatatttttgacctgaaaatttttgtacagtagccatttttaagtatgtataccaatatatgtattttacttacgtacacatgctgtattgatatgaatattagaaaacataagaatagaaatctgccgggcttggtggctcacgcctgtaatcccagcaatttgagaggctgagacgggcagatcattaggtcaggagttcgagaccagcctggccaacatggtgaaccgccgtctctactaaaaatacaaaaattagccgggtgtggtgatgggtgcctgtaatcccagctacttgggaagctgaggcaggagaattgcttgaacctgggaggcggaggttgcagtgagccaagattgcgccactccactgtagcctgagcgacagggtgagactccatctcggaaaataaaataaaaaaagaacagaaacccaaagatcatagggtagagatgtagatattaagttctttaattcacttttatggactcttcagaaggagagattataattgtatatgcttgatacattgtgttggactggaagcactgtgaaagattcttagtcaaggggagattttacattcaaagaaaatggaaaatccccctgctttgctcggagggaagaactgcacttaaaagtttgatgtgtattggtgtcgtcttctaggcatttcttatatctgtgaacatgtgcaccctttgtatataaagtggaattacatgtttacttacgcacacacacacatgtacatataaagcaggaattatactacccagagttctctgtgacatttttgttccacttaatgtatcatgggagagtccttgagtgtggacctaggagccagactaccgaaggtgcagaccctgcagtttactagttgatttaacctttctgtaccctagtttcctaatctataaatgaagaataacggtagcatttacttcagagttcttggtaggagtaaatgttaaaatacataagctttctctgctgatgaatatttacactggagtcttaggaagggtccttgcttattttctattctaaagttgggctggacatagtgggccatatgggtgccatcagatgggctcttgtttctctgtgacccgttctgttagacctctttcctgcttttttccttgaggttgtttatctgtcctctagtgaaccagctggtttgcaggtggtgcttttctgagagtgtcttgctgttaacagttactatggatgtcatatgccagctggttctgttaaaaaaaagtctgtgaatccaaagccttgaattttgaacattattttctgtctggaattttgaagaactgattcataaagtggagaaatgaataaagatttttattttacaaattccagcacttagcattttctttattctgttactgtgacatctatttgggaaaccaaagactaccattctttataaggattcctttttttttttttttttttttttttttgagacagattctcactctgtcacccaggctgcagtgcagtggcgcagtctcactcaccgcagcctctgccttcccaggttcaggtgattctcatgcctcagcctcccgagtagctggaattacaggcatatgccaccacgcctggctaatttttgtatttttagtggagacagggttttgccatgttggccaggctggtcttgaactcctgacctcaagtgatccacctgccttggcctcccaaagtgctggaatgacaggtgtgggcctctgtgccaggccaggattcttcttttaagagactatagtgagcagcatctaccaacttgcatccttgtatgttgcatatcttatttgtttgcttggggagtaaaccaaagtaaaaacgtcctttgtcaaattaaggaccttacaagattttctgtgttaatggattggaagtctttactattctttttttttttttttgagatggagtctccctctgtcgcctaggctggagtgcagtggcacgatctctgcttattcagtctctgcctcccgggttcaagcgattctcctgcctcagcctcctgagtagctgggataacaggcgtgcgccaccacacctggctgatttttgtatttttagcagagacgggatttcgccacattggtcaggctggtctcgaactcctgacctcataatccacccaccttggcctcccaaaatgctgggattacaggcatgagtcaccacgcccagcctagatgtctttactattcttaagatggcagtagtccccaagttgatctatggattcaactcaatccctgtttaaaccccaaattgcttttttttgtagaaatcggcaggctgatcctaaaattcatatggaaataaaaagggactgagaatagccaaaactattgaaaaagagtaacgttggcaaggttatgttgcttgatttcaaaacttactacaaagctagagtaatgaagactgtgtggtactggcataaggatgaccatacagacccgtggaccggaattgagaatccagaaataaatgcatactttcacaacccatcaatttttggcagcggtgttaagacagtttattggcaaaagaataggtttttccacaggtgatgctgggacaactgaatatccacatgaaaagaatgaagttggaaccttatcttatgtcataaacaaaaataactcaaaatggatcaaaaacctaaacttcaaaactcttagggaaaaaaatagatatgtcttggattccagaatgatttcttaaatatgacaccaaaagcacaagcaaccaaaggaaaaaagataactcggacttcatcaaaatttagtatttttgtgtttcaaaagatactatcaaaaaaaaaaaagacaacaaaatgggagagaatatttaagaaacacctgtctaataatggtctagtattaagccaaggctgagttcttatttccccatccttaagtttacacgatactatattagtgaagttgaattctgtcattaccacatgtatcttgaaagaagtttgtgtggatcacgggtccagttactttctccgccctttccctccagaggatttgtcactctcaataatgttatatactaatttcaaggggaaatacaactcaaaacaaatcagaaatctgaagcttaaaaatgttatggtttagatgatgaaaagggaaaagtacatttaattcatatcatatttagatgtaaagcacttaatgttatattgcttaacctataaagtagcgcttcagtgctctcatcatatgaagtaaataatagaaaattctttgtgtgacacatgtctgttttcagccaatcagaaaccaggattattttgtatgtaataatagggtttactggaagaggagctatacagatggtacttagaggatgtagggccctacgtattagggcttcttagttgtagcgaagagcaattggtctggtacgtttagctttttcacatttagttttgaattctgactctagaaatgtacaaccccatcttttgaattacaggttttaagatgttatttgctcttaatacgtcttaaggtaacagccttgatcactgcttttactttcgatgaaataacttaatgagctgtgaagaaaaaattatcagattttaagggagagaattttatgaaaatgtctttgaggttcctgtcacctttatgagaatgtcttcaaagtttccatcaccacctctaccaatttttcttccaccggagccagtggacttaggttccataacaagctcctcttgttcactgaatgagctagacaatatttcccaccttttaaggaaaatatcagctgatatcaatgaaattaaaggaatgaaagcagctattttgacagtggaagcaaatctttttgatctaaatgttagagtgtccaagaatgaagcaaaaatttcatctttggaggttaaaatgaatgaatattcaacaacatatgaatgcaacagacagtttgaagatcaagaagaagatactgaatcacagtcaagaactactgatgtaaaaataatcggcttccttagaaacgttgagaaaggtaaactcttaatatatgatatgttctaggtacccatcctttgatctgtatctttccacgtatgttgactgtagctctgatgtggagggagcaagttacagagaacttgaatttttcatggacctttaatgacaaatttggattctgcttgatttagcttagcaatctagaattgatcagaattccatcctctttaatggagctctctaaaacgatgttttgaaaagacagatgaacctagagcaatgaagcaaaacttgaaatgtggaagtgtggtctttcatgtgtcttgtgaaattattttaaaatgtctcattctttcatcatgtactgttgatgtgaaggagacctgttgcagtatttggatggaaagagcattcttcctgtaacttttcacctcagttttccaagcttcccacaggaatgcaacttgacctaagtgtcatcttcgttacagttcctcagaatgtgtgtttttttatggtaataattctggaaggaattgacttttttgggacgcaccagtaaaatttcatataacttatgttttaaaggaaactaactgatacaatttcaaatcgagtataggttttaaaatttaaaaacaccttttaatgaaatgtggtgcttggtgggagatggcccacttaacatctttgcactgagtaagcaaagcctgtccttgtgaagccacctgtaatggatatacccaaaatcagcatgtgggcatcttagtaagatttcagtatttgcaaccctatcagttacatccctttgtacactgtagtgcagtaccttataatgagcaagtgagtgcctgatgtctgctaagcgctgtgggggctacagaaaagtgtgacattctcccatcctcaaggagcttaacatcaaatcgaggatggaaaaaaatcagttctttgtccctattttgtgcagtcagactgctgggcatattattgttaggaatagtgaacctaataggaattaatgttaggagcctattttagaagaaataagtagttgaacatcttttcttgtggaagaggcaaagaattattatcatgctttgctaacatagggtgtggattgtagagctgagtgtcttattgttttctttgcatgcatcgaagcccagagtttgtcttttaggaactcttgtttagatgatgagagtgttttgttttgctatttcgattatcttcaaaggtcatgagtgagtcgtgatggtaagagctcaggtgatggagggaggtgcttgccatgcttattgtgcagttggctgtgatgcgagctgctgggccacaaggtgccttttcctggattttccacccgtttgccacctttactttccccgcagaattcaaattcaggaaaactgatgtcctcatagagggagaaccaggagtgttttaaattggcatttgtggtttaaccctgagtacagccttttttgtcttacaggatatgtctttggtctataaatactattaaattgaattgttgaagctttaagttacttttaagacttcaagttaagaacccagaaggattgatttttgggaaccacatgctggtattgtctgtgttgtaagcttagtgaagttttaaaatttatattctaggaactcaacagaggcaattattatcccgactgcaaatcgacccagtaatggcagaaactctgcagatgagtcaaggttggtaatgtttcaagttgtactgtaatccagccatttcagttgccatttccatttcttacaccccatttaacgtatctcggatctcttagatcctgccctaagatgttatatttagatctgtgaaaatattttagggccaggagataagatctgcatttctttcatgttatatagtgttataattttttgcctcattggaaaactttgttcctttcacaccattccaagtgtgtccctagcactgtcggctgtcactctcctgctgtcaggagtgacctgcgtttctgatttaccctcccactctacccagcttttgtcattgccatgagtggcttttgtatcctgtttttcacctggttagccttatcctcttgtacttcattttggagtcttatcaccagggccacacctggaacttgttgttctagtgttctagagccactctagtttgcctgtctcctttcctctccccacagacacacatgccaggggctactccaggactggagctgacgccttcatttttattatctctgtcctcagtgcccagcccctgccagatgcatgttcaatgtcttaaaaatgactgcaggataaacacaggcaaccatgagagacccggaatcatctcagtccttctgtttcccctaagtctgtcttttgtgggaagctctggtccctagacccctctcagtcaggactccacagtcagtcactctgttccccgaccctcccccagctttccagctcagaaagtgtgcttttcctccctaagggtcagcctccaccagaggccagatcccactgggttggtgagccactggcatgtcacccactcctccaacttcattctctgcctcctgtcttctctctgtagaggtgttcagacattctctgcccgtgattttgctctctcatctcccagcagtccgtcctgcttcctccacaggagtatttgaaaaggttgacagccgagatctgtgtgtgggatccacttcatcagctcttgtgcatgttttctcttctgcctccttcagcttttcattgtacccatggtgcacgcagtttgaaatagcaagtagttctgtgaggcttatgaatgactgcagtccttagctcctatcacattttttattctaagatccctttgtttctgcatattctattaattttctaaaaacatactgattttgtgtacacaatactctttgttatttctctgtggtctgaaaggtggttttgacatttttcccctccctgcttcgtcttgttttctctaagtggtctgttttggctgtcttttatgctggaggttcccctctgatgtctggggatcctaggtggtcttacatttaagagtggagcactcagaaggtcactggtattctgggttcatgagttggggcatggggcactttgactttctgtttgaaactagaccctgtggtggaaagtgatttgtcctgcctgtctggtttgtgggcaccctgatgtcactgccttcaagactttcctctcaggctggtcagcttctccaaaacaaagtttttcaagtaatagcctggtagtcagagttctgcgagcttaagtggggaaagaaggctgggggaggcacctcaccattaattattatgtaatgtttatttaaccctcccccaaccattgtcagtccagtacttctttcatcatggctggtgtctcttggtccagggactctgttcttatcctctgaagagtctaaagctccactttctccaagggagaatgcatgcagtgggtaaagatttatcaggaaatctaattgcctttaaaaatttttaacagtgtaccttcaggtgattttgtcgtagcatctttctggcagagaccctaatgcttcatccataggcctctccgaagattatctacaggaaagcacatcaccagtcatcccaggtgtcttcagtgtagaggtcgggattggtgtggcaagcatcaaaaccaagaaaacagtggccaggtgcagtggctcacgcccataatcccagcacttggggaagccaaggcaggcagatcacttcaggtcaggagttccagaccagcctggccaacatggcgaaacccaatctctactaaaaaatacaaaaattagccaggcgtggtggtgcacatctgtaatcccagctactaaggaggctgaggcaggagccttgcttgaacccaggaggcggaggttgcagtgagctgagctcgcaccactgcactccagcctgggtgacagagcaagactgtctcaaacaaagaaaacagatacatggaattagagttgaagaagaactaactgcttcttggacacatctaatacacctcttttttgcctgccatttcttccatttcttcctaaggtccttttactgccagttcctgagcctttggagaatcttgtggtctgaattggattgcttcattattgccttagaattcagcttttacagatcccctgagttcttaatcatctgttttccactttgaaaatttctttttacacttattttctttgtgagtttatgctttcaaaacaaaaacaaaacccttattgacatttctgtgggctttcaggagggaacaaaaagtaaatgcatggggtcagcctgtggtctctactcagaagatgttacttactcccccgtctgtctggtctccatgtgacctgggctgctaacgttccgcttgcagagaggtgtgcgggagggaccggtgcacgctttcctcaaccctggagcatgttacacttgggttcccatactttctccaagctttgacctttcggcttccagttcactctgtctttattcttctcattccctttcattctcatgtgtcagcgcatctcctccattcctcctcaaaaggttagctttgctctctcccaccttcagcattattttcatctcttctgtgttcacccaacctatgaactggtagaactccttcgtctcagaaagtgcagagtggtgggaaggagtgaagcagcccctgggccactgttgggacccacctttgacagttgtgagacctcggtgaatcatttaataacttggagctgcaaacagtcatctgtaacatgggaggaaaccgactttgtaggctttgagtgaggattcagtgagagacggccaccctgaatatgttaaacacttctgtcaccttcggttttgactcagcatcttatttctgtccccccacctacaggtcaaatctgaattttctacttcctcttaaacatgggagagtcccacaaagactttaaatctaacatggaaatgtatctttgccccttttaactttgctctttttcttttgctaagtttctcatcccagctttctcttccgcctgtctccctttaccatctgtactgcccttgctggggaaggcgggcacgccccttcccaggatggagcatgtcttctcttcctgtcaggtgtgtgagaccaggacagacagcagagaatcttttcattcagagcctcaccctctgtcccgggcaacagcaggtcgagaactctggttcttccttaacactgtttttctaaaaaccagtttgatcaggccacttccttccttaggaacctctcttgatttcttttctcttttttttttttttggtttgagatggagtctccctctgtcactcgtgctggagtgcagtggcacaatcctgctcattgcagccttgacctcctgggcccaagcacttctcccacctcagcctcccaagtagctgggactgcgggcatgtgctcccacgcctggctaattttatttatttatttattttctggttgatgggaggtctcactatgttgcctaggccggtctcaaactcctgggcttatggaatccttgtgccttggcctcccagaatgttgggattacagacatgaaccgccacaccaggccacttgatttcttactaattatagaccagaatcgagagtcactgagacatagaagaacctttattatatgtgtcagccttccttggtatgtactgctgagcccaccacacacacccttccagccattccacattctaacctttctcagatgccttcggccttgtgaaagcccctttccttctacgtgcgttttcctctgcctgaagtgctgtgttcgtttctccgagtctctctccttgtttattcctgcttgttcctttactgctgacttcagatgttcctccttgctaagcttttcgttggttcttggctggagtgggctgttctgtattctcagcaccttgttcacatcccttttgggtcatgctattctgaaattgtatatgtgtctgtttttctttttttctttgtgtatctagctcagttctcttagttgttcagtaaatactcagtgaatgaacataaatgaataccctgtaaattttggtctctaagctttaaaagaagtgtattaacttcagtccgttgatggcgtattgataggtcagccattctgggttgtaggtcttggcatattttataaaatagtagatgatgtgagcttatggttatttgcattaaaggccagtgtttttcttgatacatatgtttaagtgtccattcacctttcagttaccttttaaagtagtcctcggtttataaccaactggaaattataccacttgaattctttttatcaggacatgattctaagtggtactgtgcgaagtgaacaaaccagattttggaaaagtggttcagcagtctgtgtattctaattatagggagcattaggactcaaattctccaggtttttagaaaagatttttgtactttaagggtatattgttaatatctgttgagatgcctcacctgagaacctttctctgctgtggttagggagtgttaatcagaatcacttgtgccgtgccctacgcgagaaggactccttgagttctttgaaaacatgtttggaatagaattatagccctgttttcctgagtggaaccagttgtgattttcctttgaaataatttgaatatataaaagattgacattcttctcacatatataatgttgggaatgtaaggtatattcaaaagtaaacatttgtggccaatttttttggctcagattactatgacatggaatccatggtccatgcagacacaagatcatttattctgaagaagccaaagctgtctgaggaagtagtagtggcaccaaaccaagagtcggggatgaagactgcagattcccttcgggtactttcaggacaccttatgcagacacggtagatggtttctttttcttgtgtagttaatttgtgtgattagatagtaaaggttaaccattcgtttgcagcttccctcctccccgccctaaccgctagcgtagagtgctttcattgattcagtagctagcccatgaatagttagccaaattcagttttcaagaattccagttcatctttcttgttcagaaatccattaacctacaaattacaactcagtgtatgatttaactctattaaagattcttttctttatgcaaattcaggaaatgcaagtttaaaagccagctgaccataatcaggtcagctctaaagagagttggcagatcaggtttgggtgatttttcccttagaaaattgactgtttctataaaagaagaaacatacagataattagcataaatgctgctggcccttgtgttctgagcattgatgctaattttttggtttgtttccatgttgaccctatgaagatcgaatgggtgatggggtcaggcttgaggggagattgtccttagtaagtacaggctggagggtcactggtgatgccactgtgactgttcatggccatcgtgtgttagcagagaacccaccagtgctgcacctggtagccctacctagtctttttttattgaaccaaacgcaaagccaagggagtgatagttctgctgaagagcactttagggggctcagcgttttgtgtttgtttccctaattctatggtattttttatctgtctggcagagatcttgtacaaccagataaacctgcaagtcccaagtttatagtgacgctggatggtgtccccagccccccaggatacatgtcagatcaagaggaggacatgtgctttgaaggaatgaaacccgtaaaccaaactgcagcctcaaacaagggactcagaggtctcctccacccacagcagttgcacttgctgagcaggcagcttgaggacccaaatggtagcttttctaacggtgtgttgagagctcagattttcagggtgctgtcattgtgaagggaatctttgacttgtttctctaccttgaatgaatattggttaaaggccttgcttttatttatattcagtaatggccttttttcttctttcagacaaacccaccaagtacatttcagactctttttcctgtgtctttttcataggtgggctgttactccagtttgaaaacggagttcagccatggaacctgagagacctcttccgcttatgctggctaaaggatgaaccaccattcttgttgccttctttacctttgtattttcttcagaaactgtactgccactttgcccttttatcagcaatagtctcttgcaattaacttgagagaaaaatttagatttgatgctatttctacctcagtgaaatttctttgaaaggagtttctcacctaatctatcaagatcttggaactgtttaaattaatgttgaagagtaatatttagcagaactcagatgaactcatttcagatagcaccatagtttttggcaggtgacagtttcttatcaccgtttctttcactgggtatcagtggtagctgcaacgccactgatcatttccattcatgatagagaatggtaattatgttccttatatcttctaaaatatttagaagcacctcttcattggcaggagggataattactcaatcttaaaagcgtacagattcaaaggaaaaacagtaatggattttgaaacatttccttgagtaatcctcttcttggaagagatatgaaaatgtattgaatacctttctcgatcattaaaaatagaatagacttcagagggaaatcatatgttagtggagcaataacacttagctttattttaattggttgcgtttcctactgtgaatcaatgacgtagtgtcgtggttttgattagtggagggagttgaaaatctgaccctatcaacaggaagaaaaacttaaaaaatagtaaaagctgcagtaggcagtcccgatttattgactctgtatgttttgtctaaagagaagactccagtgttttcactactcttgattttcaatttggtaccttaattttttggtctattaggatctggtttcatttaaatgtaggtgtccatatgaggctttatggggtatacatgtagcagcagtgacaccataaataatatgttagtaaaaattcttgccagtgctgtggccattgtgctgacagccatgatgagtggtgagcctcctttcccattgctttgactggggactcagtgtttccctgctgctcaaggatgaagctttgtaagattagcataggggtgtggctggagagactcctgcagaacagttctcaggagtctctagtctctgcaccacttcccctgtgagcagggagtttgaaactgcaattgcttctggttggttttatgttgggttgtttcaaggatgctaccaacaacaacatctgttttaacctgctgtcttttcactcactgtcatatggcagcacagattttatagcttgctttctttgttttttttttttttgagatagagtctctctgtcccccaggctggagtgcaatggagccatctcagctcactgcaacttctgccttccaggttgaaagccattcttctgcctcagtctcccaagtagctgggattacaggcatgcaccatcacacctggctaattttgtagtttaagtagagacggggttttaccatgttggtcaggctaatctccaactcctgacctcaagtgatccaccaacctcggcctcccaaagttctgggattacaggtgtgagccaccgtgcctggcctatagctttcaataaaaggtgaatttgcctcttaaaatttgaacagaaagttttaatagtttacaaagtcggtgtcagccagtgaagactaggggcatgaccttcgtatgacttaatgtttttaaaagaaagataaagtttctttgtaaggtattattgtaataatcacatttctttgtaaagtattatattgttcctgagtatctagctactttgctttccagctaggcttctcttgggtattctcttaatcttttatttgtactgggttcttgtgtatatattatagtctgctgtgtgtaatttattataggaaaagggtaagacacatttactttgcggggatgacacaaaaaacctgtaaaaattagagaaacttccagtcatctcacattttctttggaaccgattattcttgtatcttagaactaaaatgacttatactgttttgtttttagaaagggtatccctcctgttgcccaggctggagtgcattggcacagtcatggctcactgcagcctccacctcccaggctcaagtgattctcccacctcagcctcctgagtagttggttactacaggtgcacaccaccatgcctggctaattttttgtattttttgtagagatggggtttcaccatgttgcccaggctggtctgaaactcctgagctcaagtgatctgcccgcctcggcctcccaaagtgctggggttacaggcatgagccaccacatcctatttaaagcttaaataggacttttactatttttaaagtagcatagaaaactgtttgtatcaggcatagtcataattgctctttgatgctgctcctatctgggctgcatgactacatttgtgtgccttgttctcctgtagtgaggacagaatgtgggtcactggaacagtaagtactcatagaactagctgctgctgctattacgactggttgcctgttttgcattttttccgtttaatcatcagactctaaggaagacattattttctctttgtatagatgaggaaacagaattccaaaaagttagctaacatttgcacagagtgtctggctgagcaactaagtggcagagtcagattttaactgacctctggcaagaggactagaggaatacagttgaagtgatacttgctttcatgaacatgaatgtgaaccataatacataatacccatgatgctattttgtggggagtttaaggtgtctcagtccagaaattagcagctgattattgcctgtagctgtaattttacttattcagtgttatttaataaattgccagcattacaatttcgatgaaggcagatttttggcttactgaaacaggataaaaatctggcaacaggggtcccactttgccctgtcatagtaatcgaagctgtgattggatgtggcacagggagtggagtggatgggtgtgcacttgctttccaggctgctgctccccgtctgtcccttattgcatttatcatcttcagcccagtcagtcttgctgttaggggaactgcccagtctctgtaagtgatggcatttgtgaccccattgtaggtaaaaatgttttcccctttttagacattgctggctgagcgcggtggctcatgcctataatcccagcactttgggaggccgaggtgggtggatcgcttaagtcctggagttcaagaccagcctgggcaacgtggggaaaccctgtagccaggcgtggtggcacgtgctacttggtaggggctgaggtgggagtatcacttgagcctgggaggcagaggttgcagtgagccgagattacaccactggcacaccactgtactccatcctgggtgacagagcaggaccctgtcgtaaaaaaaaaaaaaaaaaaaaaaagtaaaagacattgctgagtttcgcacctggacttacagctcagcaggtgggaatccttttgtatttgggccactcatcatcttgctggcgtgtgaggattcacatctccttatcaccttacctgttttcagtttttatttaattttattagttccccacttgacgtccttctctatttttaattcagctatgaattagtattgagaattagaatttttggtgaaaaatttggccgtagttgcagagtcactgtcctctttccttttcacagtgagaactgttgtcttcttcctggcaaccttttataggattctatggccagtgttaatcccataatttgagctcacttattttatatgactgtacatttaacagaagattctaagacaggtttgagggaaatatgttaaaggtgctgtgtactgaattgatcataatgaatgaaatacttttatttcctttccctttgtagctgagatgagtgaactgagtgtggcacagaaaccagaaaaacttttggagcgctgcaagtactggcctgcttgtaaaaatggggatgagtgtgcctaccatcaccccatctcaccctgcaagtgagtaccatccccccatctcaccctgcaagtgagtaccatccccccatctcaccctgcaagtaccatcccccatctcacctggcaagtaccatcccatctcacccagcaagtaccatcccccacatctcaaccctcaagtgagtaccatcccatctcaccctgcaagtaccatcccatttcaccctgcaagtaccatcccccatctcaccctgcaagtaccatctccccatctcaccctgtaactaccatcccatctcaccctgcaagtgagtaccatccctgcatttcaccctgcaagtaccatctcatctcaccctgcaagtaccaccccctcatctcaccctgcaagtatcatcccccatctagccctgtaagtgcgagtaccatcccccatcttaccctgcaagtaccatcacccacttcaccctgcaagtaccatcccccacctcagcctgcaagtaccatcccccacctcagcctgcaagtaccatcccctatctcaccctgcaagtaccatccccatctcaccctgcaagtatcatcccccacctcaccctgcaagtaccatcccccatctcaccctgcaattgagtaccatcccccatctcaccctgcaagtaccatcccccatctcaccctgcaagtgagtaccatcccccatctcaccttgcaagtaccatcccccatctcaccctgcaagtaccatcccccatctcaccctgcaagtatcatctcaccctgcaagtgagtaccatccccccatctcatcctgcaagtaccatcccccatctcaccctgcaagtaccatcccccatctcaccctgcaagtaccatcccccatcttaccctgcaagtgaataccatccccatctcaccctgcaagtgaataccatccccatctcaccctgcaagtgaataccatcccccatctcaccctgcaagtgaataccatccccatctcatcctgcaagtgaataccatccccatctcaccctgcaagtcatagccagctgattttggctttcagtttagtgtctgtatcttacaccttattttgtttttgtttttctgtggacaagtttttagttttataactaaatggagtgacaattaccatggccctctccagagtagcgtatttcttgttcatgtatgtttgttgagaggcaagggtgggggggctttgtttgtgcctcggacctgtgagatactgaaatacctggggttccttaagaattctgtacgtttaagcagatgggtatatggtaactgccccagtttgtatgcattttggccacacgcagtatacacagattttgaggagttgagggaaaagttagttatgggtaatgaaaacattttggacttgggttaaatttttccttacaagctggctggctcaatgtaatgagctttatgagatggctttttggggcttcttttttttgccgggggtaggtcctatggatggaatcttcatttttaattcttttaaggaaatgatgtgggaataatacagctgtacatataaggagagtatgggatgagtctttttgtatcacaaagccttgcatagaggatgtgtttattgtattaatgagttcactgcataaaatatataccttttttattaagtggtgtgatttttatcacaaaagcttgtctttcttggtggcttggcttgagttaaaagcctgtgtttgtgttatcccaagctttggaataaatgattgtgtcctattttgatatatggtcttattttaaaatattctttttgttgctgttttttttgcatttctcaaaacaagtagtgatggggagtgtaaagagcccttatacacagaactaataatgcattgagaagattgaatatgaaatatgctttttttttgttttgtagagccttccccaattgtaaatttgctgaaaaatgtttgtttgttcacccaaattgtaaatatgatgcaaagtgtactaaaccagattgtcccttcactcatgtgagtagaagaattccagtactgtctccaaaaccaggtgagtgagtgactgtgctactacatttgggtaaaaaatataaaatggcattttgtgactgtaaatggaattgaacaaacaaaagatggtttcagaaataattttggcaggatcagttaatccaaccagtctttaaagagcaagtgtgcctatctgtagtattccgaagtattttgactagtgaatatataaaccttaccattctaatttaaaaatggttttcactttcaaaaaaaacatcagtagactgcattaaaaatgggttttccaaacagattggagatcagtcctggtttttattttgttagcagttgcaccaccagcaccaccttccagtagtcagctctgccgttacttccctgcttgtaagaagatggaatgtcccttctatcatccaaaagtaagaacttctattttctcaaatcaatttagtgacaacatctcaatttcctcatttaacttcttttttgtcagagttactacattggtgcaaaagtaattgcgatttttgccagtaaaactattaagttgttcctcgtcactgaacctccatctggccccttaggccaagtggtctgaaactgttcaatgttagtatcccaagcactcagtggggggaagcatatctttgctagtcacattttccattattccctgcatttaagtatatggatgggttttagcgggggctggggggcagtttgaacctaatgtcagaactgagatgaagaaatccagtaggtactgcttaaaaccatccaaacttgtactgatgatggttgatgaatctccagatgtttagttggtcaaaatgaattatctccttcttgccccggtagcttgaggaccatatgaaggccttcacttgcccccatctgtaactgggcgtagatgagggtactcagtgaagagtgtaagggataattagaagtttttgtggtatgctaaactaccttttgaaattgtacttgctgtgattctttgactagaattttgtgtctcaaggttaagtccatttttcaaggcttcactagtattaaaatggtccttatagatggaatctcttactctgttaatggttagggtgggctggttattgtctcctaagttgtatgttggccaggtgaggtgggtcaggcctgctatcctagtactttgggaggtagaggcagaagtggaaggatcgtttgagcccgggagtttgaaaccagcctaggcaacatttaagagaccccatctcttaaaaaaaaaaaaaacaggcttggtagcacacgcctgtagtcccagctactcgggagactgaggcaagaggtcatgccacttcactccagcctgggtgacagagtgagaccctgtctcaaataataaaataatgtgtttacttatattagccttgtggatattgttgaagctctgttatctctattcagcattgtaggtttaacactcaatgtacaagaccggactgcacattctaccatcccaccattaatgtcccaccacgacatgccttgaaatggattcgacctcaaaccaggtaaacattcaaattcgtttttctcatgtcagttcaaattcttttttctaatttgcagtttctaaatttataagcacacaaaattggaaactagactgttactttgaatttttttctttgctgtttaattatagaaggctcctttggcaaaataatttactacatgggctaaattttacattatccagtggttacttttttaacctagattatcttgctctgttgcccaggttggagtgcagtcacactatcatagctcactgcagcctcaaacccctgggttcaatccatcctcccacctgtagctgagactacaagcgtgtgcctctatacctggctaattttttttattttaagtagagatggggtcttgaactcctgagctgaagcgatatccttccaccgtggccttccaaagtaccaggattacaggcatgagccaccacacccagccagattttaacttctcattatatactacgcaaacatatactaaggccagcaggagtatatatatgtgtactgtacttgaatttcacatccattttcttcgacattagcaactgggagatactgaaaggaagtttcaaaatattttagtgtggccagaaaatttaattacatatggtattatcttttatctacctgacataattgaattatttttaaaaatctgccatttatattgtaatcttatgaccaaatatttattgcttaaaactagtcaactttttaaactgagatatatggtatatatggatacaaagcagataattaaaacaatttttggttctgttcattcagcgaatagcacccagtcctgcctggcagaagatcatgcagtttggaagttttcatgtactgatgaaa

SEQ ID NO: 15893 - DNA, 48954 bp, Homo sapiens
gaggcggtggtgtcccggctgcggggtaggagtccgcggcagcctccgggtaagccaagcgccgcgcagtgctgagttcccgcacgccgcagagccatggagatcggcaccgagatcagccgcaagatccgggtgaggcccgtgccggtcgggggtgggaagccaggtctcggcgagcgggcggttgtcaggagtaacggggactgtgggcccgggtggacgccgcggcctggcctccgctggacgctcctggcgggctgcggctcctcctcgtccaggccgcctcggccctggggacatttgcggcctcggagcgtggctgcggctgaagtagccgccgggaaatggaaggacaggcgcaggcccggctggagccaccaccgcggcgcacggcgccgctttggatccgctgcgggaggtgggcgccgcggggctggggctggagctggagtggggtgcggggtggggggcggtgcaggcgaggctcctcccagcccccgcccgggggatccgaggtgcgcgcaccagcaaagtggcctcagccgctgcagagtccggtcttgttttcctagagccgcctttctcacatgcacgtttgctctttttctctcagagtgccattaaggggaaattacaagaattaggagcttatgttggtaagtgtttttttggttgttagtcttacagaatttagagtttgcagctaatagaattttagtgaatgcgtatttctcaccgtactttggacattgggagagactcccttctaccttcttcaaatcttatactccctggttacttctttatcatctttttgcaaccttgttttttttctcccaaacctccttctgttatggtgttttgaaatttagtttcctccgttaaggctctgtttgaccgaattttattttatgtttttcctattctctctctctctcattttaaattctagggacgggtctcgctacgttgcccaggctggtcttaactcctgggctcaagcaattatctgaccttagcctccctaggtgctgggagtgcggggattactggtgtgagccaccatgcctgtttaaagtttcctattcttgttactttcctcttgacatttgtttttagaactctgatgttggatgtgaatgtttgatgctttctggcatttgcttctgtaatggttcagtgagttttattttccgatctctttatgttttccctctctctctgaaacagtaaggctttttccgtctctttattcttttataatttgagtgtttactctgggtcaggtactgtgcttaactattgtatatgtattaactcaggataatccctacgagaatcctggaaggtaagtggcagtatctttgactgtgtaaacaaggaaactgaggctttgcctacttgagcaaggttttatggtttgcccccaaagctggtgcctcctataaaaataatagctaccactaatgacagtggttctcaaagtgtgggagactccaagggcctctgaagtcaaaactgttttcatattaatactaagatggtatttgttatttttcactgtggtggtggtgtttggattgtgtaaaactaatggttgataaaacttgtcagcatagtaacaccataatgaaatcatattcaaatcactccccccttgtagtttttttctttttgagccaattacacttaaaatgtcattgatgaagatgtgaagtccagggtttacaaaatattttttatcttcttagtattcagtgcgaggaaatagaaatgctcataaaacatttttattgtatactgaaatacgattgttctgaggaaaatcattttagttgagaactaagctagccacctctttcagggaacatcatttttaacttcaaagtactgacaaactggttacatacactaggatatttggcagatatttacttgaaagtgagcaaagaaaagaatccatagtctttgttgccaatcacatgtgagctttcaaatgaaaattagaattttggaaaatctgagcctgcctccatgaatttcacagcttcccagtacttaaaaaatttctgattaaataaatggtgatttaaaaaaaatttgttattattattattttttttgagatggaatttcactcgttgcccaggctggagtgcagtggcgtgatcttggctcactgcaagctctgcctcccgggttcaagcgattcttttgcctcagcctcccgagtagctgggattacaggcatctgccactacacccagctaattttttgtatttttagtagagacagggtttcaccatgttggccaggctggtctcaaactcctgaccttgtgattcgcgtgcctcagcctcccaaagtgctgggattacaggtgtcagccactgcatccggccaactcaatggcgatattaaaaaataattattttatactgcataatgaaatatatcaacgtgtcagtggtttttgtagctaagtgaaccaatcttttctaaataaccaatgcataatattacaaaattatgcagtggattaaagatttatttaaactctggggtgggtcagtggatttttgtgcaacagttcaaaaaggtcattgacgtatttgacattccacgttgctttaacatttaataagctaccacttgtttagttttggtgtagtgtcacagaagaatatccaccttatctgaaaagactatcagaatactcctttttcaactgcatatctgtgagaccagattttttcatattcttcagtcataagcacatagaacaagatatataaaaatatgaaacaaggccagtctttgcagtaaatttttctttttcttttttttgagatggggtctcactctgtggttcgggctggagtgcagtggtgcaatcttggctcactgcaacctccgcctcccaggttcaagcaattctcctgcctcagcttcccgagtagctgggattacaggcacctgccaccaccccgccccccccccccggctaatttttgtgtttttagtggagacggtgtttcaccatgttggccaggctgatctcgaactcctgaccttaggtgatccacttgtctcagcctcccagagtgctgggattacaggtgtgagccactgtgccttgcctaaatttttttttggaaaatttaataatgttacttgtgttaatataattggatttgtgattaacatgtgatggatttattttttaatgaattaataaatactttttaattaaaaatgatcagttctaattttgaacaccataaataatagaacctgcataaaccaaagaaggggcccaagaccaaacagtttgagaattggtaatttatggagtacttaccaccatttgctgggcactttcataaacgatttgttgtcaggattgttggaagactaacagatgagagaattgaggctcagagaaaataaagctgaaccaagatttatttattcttttattctttcaacacttgaactgcattttttatagttttctttgaaacaaaaaaagtacttctgaaatgaacctttctgcctgcatagaaatattacaagtatttaaggtattaaagaaatttgtcacagcatggtggttcacgcctgtaatcacagcactttgggaggccgaggtgggtggatcacttgaggtcaggagttcgagaccagcctagtcaacatgctgaaacctggtgtctactaaaaatacaaacattagctgggtgtggtggcaggtgcctgtaatcccagctactcgggaggctgaggcaggagaatcgcttgaacccaggaagcagagcttgcagtgagccgagattgtgccactacactccaacctgggagacagagcaagactctgtcgtaaaagaaaaaaaaaaaaaagagaactggaatggagttttgagggtcagagattagagttcctgataacagcttttgcttccttatcttcttagtgaggtttttgtttttttgttcttttaaatcctagacctcactctcataatcactgtaggattaccactaggagggtgttttttggcttcttttatttattttatttatttatttttttttgagacagagtcttgctctgttgcccaggctggagtgcagtggcaggatctgagcgcactgcaagctccgcctcctgggttcacaccattctcctgcctcggcctcccgagtagctgagactataggcgctcaccaccacacccggctaattttttgtatttttagtagagacagggtttcactgtgttagccaggatggtctcaatctcctaaccttgtgatctgcccaccttggcctcccaaagtgctgggattacaggcatgagccaccgcgcctggccttttttcttttttttttttttttatcctagacctcacccttataatcattgtaggattaccactgtgagggtaaaaccgtgcattgagttgacattatttaatgttaaaattgatttttttaaatgatgtggagcttttgggtctatttgtttattcgatgttgctacaagtttgttactgtgagtaattgaaacctgcctttagcaagggtaaagatgttcacttgagaaatgagtgttattttgaaactttgcaaattaaaactaaacaaaactcaattctttttcttggggaatgttcaaatatttcccataagcttctttgaaattaataagcattattaaaaagattcaaggaagtgaatgcatgctcaagtttgaccctataattcagaatgtttagttttgtaagtatcaattattcttaatttccattcttctagtatttgaaatacctgtggaatgaagagaaaaaaattaaagctaagccatcttgtccaatgtaattccagtagagctctgcgactctaaagcttagagctacatctatattttcaagcacatcaactttaagaagaaagttttgaggaaacaaagttttgatctacctttccttttaaatagatgaagaacttcctgattacattatggtgatggtggccaacaagaaaagtcaggaccaaatgacagaggatctgtccctgtttctagggaacaacacaattcgattcaccgtatggtatgtttctgaatttttgtgcctcagaccaaagtttggcacaagcctgagttgatattctgtccaaagagaggttcttgacacttgagttaggtttactttggagaggcagtttgtgagtgatgagagcacagcctctgtattagtccattttcacagtgctatgaagaaatacccgagactgggtaatttctaaaagaaagaggtttaattgactcagagttccacatggctggggaggccccaggaaggggaagcaagcaccttcttcacaagtcgacaggaaagagaagagtgaaggaggaacttccagagacttatataaaatcatcagatcttgtgagaactcactgtctcttgagaactcgggaactcactgtctcttgagaactcactatcatgagaacatcatgggggaaaccacccccatgacccagtcacctccctcccttgacaggtggggattacaattcaatataagatttgggtggggacacagagccaaaccttatcagcctctgaagccagacagccaaagttgaatcctggctgtgtcttgccttggtttctctagctataaaatggaaatagtacagccacttgctttataaaattattattgaggatcaaatgggctaatatgtgtaaagtacttataggtgtccctagcattttcctaaggaattcttagtatatgtcggctatacttaatatgtttcttttgtaaacttctatatctttttttttgagacagggtcttgctctgtcaccaggctggagcacagtggtacaatcatggctcgctgcagcctcgatctcctggtttcaagtgatcatcccattgcagtcccctccttcctgaactcccatgcctgactaatttttaaattttttgttcagacagggtcttagtatgttgccctggatgctcttgaactcctgggctcaagcagtcctcctgccttggccttcagaagtcttggggttataggtatgagccactgcacctggccagcttctgtatcttatagttccttttcccccaccaaaaccagttacagatgtttttttgaactgggttggcttcttacattgccttttacaatgagttacctttagagggcaaggttttctgtttctcacttttctgtttcttactttttaagctttttgttaaactcacaccttcattttgagtaataattgtagtgtaatgttacagcatattttgagattataagtttttttaagtttggaattttaaaataggcaactttgcttttatacataaattactgttatatgcctttagttgagaatactgactagaagagtaagattcaacttaagatgctaggtcctggtaccaggtttgaggtaaagtgaggatgagggctggaggataatgatgtagctgagaatagacagacgaaatactttattaggcttctcaggctaggaactaccagttaccgtgaaaggtgatgatgtagcagaagtgagcaagtggcctgccgaatttgagtgcaagaggaggcactgagtggggagatgagcctggttaagttcttgcctttataccaaaggtcgtcttcaaggtgtttttgcccaagtaggcaactgtatgcttatcaaccgtcttgaaattctgcacagaattctctgggtttatacattgcacaaatttgaagaacattgtatagtggtcatcagttgttatgatacactgctgcctcactgtgggtgacccaacccatttgttacaatttgtccccagaggttattccctcccagccccccacaaaaaaagactgtgggtcttttgactgggaaaattaccattattgtgagtactatttttttttctaaagcgaccgagtagatccttttctccgataacttgatagaatacttagatttttaaaacagactaccaaatgaatttaaaaccaaattaattcaacattctcatctggccataaattgagttctttaacatgtagtgaagcaaagggtgatgtccccattttggcactttgctttcttaagttagtgttcattaacaccagccccaaacagactattgtgattatttggagccttgaagtaattgtgtccgtggggacagtagcatgtgactagggttctcattgaaacatgaggtttctggcatattttgagaggtactgggaagggatgtaaggcaaagtacctcatttataactaccaaaacaggttatgttacaagcaagattacagccttacagcatcagttttgaaagtaatagagtgaaatgatatagcatagtttgagattataacttgttttaacctctcagaattaagttgtccaagacaccatctagtttaagcagttaatataagctgcttaaatggtggtaataataagcaatattacatgtttatgatacttgttttactgtaagctacagtaaatctttagtacttacaaacagggtgacatattttgtagactaagactggtcagatgatattctttcccatatttttgcagaggctagatgttgaaaacagtgaagaaaaaaatacaattttttattgacttctgtaggatttatacaaagcccttttttaaaaatgtgaagtttgaaagttcataccatttattcactaaatacagtttatcagtatttatctcagctaggtgcggtggctcacgcccgtaatctcaacactttgggaggctgaggcaggtggttctctcaagtccaggacttcaagaccagcctggacaacacagtgaaaccccatctctatttaaaaataataaaaatataaaaaaatttaaaaaattatctctgaatataatgtcataaatttagagtgacagttgaaatgaaatctttcttaacagaaggtttatttttgttttttgtttttttcctcaggcttcatggtgtattagataaacttcgctctgttacaactggtaagattcataacttttttttttaatttctgcttgctatggcatatgatttgtttctttctaaagtcatagtgctttgggaaaaacccatcaatttcaaaacggttcatttgaacttttttagaaagcacatacttttatgaacttaagagcagtaaatttaacataattcaaagataatttaagtgtgggagagggagcagtgcactttatccgaaggaaataattacatatatgtgcaaagatttagcctcaaggatatttcagtattttataattgaaaacaatttaaaagttcagtcataataaacgaaattgttgtattaccatgtgtggaataatatttaactattaaaaataatgttgtggaagaataacagaatatacacgcataagatacatgttttaaaaaatgtgtatatatgctcttcccccgaaaaatcacctttgagataattggtgatttttattatatttttaaaattttctacaataaacatactgcttttgaattggtgatgaggaaggaaacgacttaaagtaataaaaatagatggccgggcacggtggctcacgcctgtaatcccagcattttgggaggccaaggtgggcggatcatgggctcaggagatggagaccatcttggccaaccaacatggtgaatctccgtctctactaaaaatacaaaaattagccaggcatcgtggcacatgcctgtaatcccagctacttgggaggccggggcaggagaatcgcttgaaccagggatttggaggttgcagggagccgagaacgcgccactgccctccagcctggcgacagagcgagactccatctcaaaaataaataaataaataaaaataagaaataaaaatagattaaaaggactgtatttttcttttcagaaccctctagtctgaagtcttctgataccaacatctttgatagtaacgtgccttcaaacaagagcaatttcagtcggggagatgagaggaggcatgaagctgcagtgccaccacttgccattcctagcgcgagacctgaaaaaagagattccagagtttctacaagttcgcaggagtcaaaaaccacaaatgtcaggtaagagtctggtgtagacctgctgggggcagatggctctgtgtatgtgacatttatattagtttttatatctttcagtttgctgttctcagcaatttttagaaacaatgaagtgatcgtgagtagttttttgaataaaataatggataagatctaagtatgattatcttttatcacaaatttagtaaatcaaagttgaaagaaagtgcaatttcaaagcagttttgaatggaatatgtaaagggagtatcctcagttttttcattgaaatttttcaagtaaacattctttaaagatttggtgataattgccctaatttggctgtaatacattttgttgttcttttaaatagacagacttacgatgatggagctgcaacccgactaatgtcaacagtgaaacctttgagggagccagcaccctctgaagatgtgattgatattaagccagaaccagatgatctcattgacgaagacctcaactttgtgcaggagaatcccttatctcagaaaaaacctacagtgacacttacatatggttcttctcgcccttctattgaaatttatcgaccacctgcaagtagaaatgcagatagtggtgttcatttaaacaggttgcaatttcaacagcagcagaatagtattcatgctgccaagcagcttgatatgcagagtagttgggtatatgaaacaggacgtttgtgtgaaccagaggtgcttaacagcttagaagaaacgtatagtccgttctttagaaacaactcggagaaaatgagtatggaggtttgtatgtacttttaaattctggcttaggctaaaaatcggcagttcttgataccaaataatatatgaagtaactaaacacatattccaaggctgggcacagtggctcacacctgtaatcccaggactttgggaggccgaggcgggtggatcacgaggtcaggagattgagaccatcctggctaacacggtgaaaccccgtctctactaaaaatacaaaaaattagccaggcatggtggcaggcgcctgtagtcccagctactcgggaggctgaggcaggagaatggcgtgaacctgggaggcggagcttgcactgagccaagatcgtgccactgcactccagcctgggcaacagagcgagactccgtctcaaccaaaaaagaaaaaacaaaaaacaaaaaaaacacatattccaaatttattttattttattttactttttgagaaggagtttcactcttgttgcccaggctggagtgtgatggcgcgatctcaactcactgcaacctccacctcctgggttcaagcgattctcctgcttcagcctcccgagtagctggtattacccgccaccatgcctggctaattttttgtatttttagcaaagacagggtttcaccgtgttggccaggctggtcttgaaatcctggccctgtgatccacccaccttgatcttggctcactgcaacctgtgcttcccaggttcaagtgattcttctgattcagcctcctgaatagctgggattacaggtgtgtactaccacgaccagctaatttttgtatttttagtagagatggtgtttcaccatgttggaccaggctggtcttgaactcctgacctcaggtgatctgccctccttggcctcccaaagtgttgggattacaggcatgtaccatggcgcctggccccaagtttatttttaaattgttttatctgctgtttctcatgctataccagattttcttccccatggcttgctcctagagttcttttgtatcacatctgtatacctttttgggatttccagcatttgagatattaatcttaaattaatttggggggtttcaatcaattttagattgttcatggtaattgctagtgagcaaccaattaactctgttttattagtttcctcaatagcactatatgcagctgttgataaaataaatgtaaagttctaatttttgttttagctaaaggttgactgttagggataatatttatatttatagtatttatttatttatttattttgatacggtgtctcactctgtcgcccaggctggagtgcagtggcatgatcttggctccctacatcctccacctcccgggttcaagtgagtcttctgcctcagcctcccgagtagctcggactacaggcacatgccgccacgctcagctaatttttgtatttttatagagacagggtttcaccatattggccaggctggtctcgaaatcctgaccttgtgatccgcccacttcggccttccaaagtgctaggattacagatgtgagccaccacacccagcctcatatttatatttttacataaaaccaagaaatactctgtgaatttctcatattactgtgtactgtttttttcttaaaatggaaacattttgtggtagaactcttgttattttctgagattaggtaagcataaattttatctgattgcaggatgaaaactttcggaagagaaagttgcctgtggtaagttcagttgttaaagtaaaaaaattcaatcatgatggagaagaggaggaagaagatgatgattacgggtctcgaacaggaagcatctccagcagtgtgtctgtgcctgcaaagcctgaaaggaggtaccttgaacatggctgtaaattaatctttaactgccttggtggagtcttcctgatttattgaagagaataatcacgaaaataatttttgtttgttttttgagacggagtctcgctctgtcaaccaggctggagtgcagtgccacgatctcggctcactgcaacctctgcctcccaggttcaagtgattctcctgattgagcctcctgaatagctgggattataggtgtgcactaccatgaccagctaatttttgtatttttagtagagatggtgtttcaccatgttggaccaggctggtctcgaactcctgacctcaggtgatctgccctcctcagcttcccaaagtgttgggattacaggcatgagccaccgcacctgacataaatatttaatgtaataccgtgtaagacttttccattgggttttgagaaacacgttaatgagagaaattgcttaacattggagaggattgcagagaatattgactaatatggtggggtgaggaggaacaacatcaattaagattcagatttattatttaaaaaaactaaaaggggcctaggcatggtggctcatgcctgtacctagcactttgggaggctgaggcaggaggattgcttgagaccaggagttcgagaccagcctgggcgatgtaatgagtctttgtctcttaaaaaaaattaaaataaattagttggtcattgtggcaggcacctgtagtcctggactggagaggtggatgtggaagcattgcttgagcctagaagtttaaggctgcagtgacatcacactccatcctgggtgagagagtaagagtctgtctaaaaaaaaaaataaggttccagtgtagttggcattttctaaaaactgcagctagtctgtttaaaacctagagaaggttgtggtaaaggcataatagatggctggcctgtgaggaactgaaatttaaagtttaataaaaatacctttcttaactcttttagaccttctcttccaccttctaaacaagctaacaagaatctgattttgaaggctatatctgaagctcaagaatccgtaacaaaaacaactaactactctacaggtaatttaaatgtattatgtttacacttggtaagacatttctgtaattcttgagtaaggtgaaaatgattgctccttaaattgtaaaataaaggtgcctgtcagatgtcaagaccaagatgaggttcccatatagaaaaatggctttaaaaggaaattgacaagtttgagaaacttcgccaactgttattggactgtagtttttcaagcaccatataatgccttttatatctttccaatgtgtgtaaaatatatagtacgtaaatattttgaagagaattttgatgaagtaggactttcatattagtagcattagattcaacattagatatgaatttacgatgtgtaaaggggagtacaattggacaatgataggtatctgaagttatagaaatttgttaaacagtagtatataaacaaggttggtttcttcccttttggcggaactcattagtagaatataaggcagagaattgactcatttgtgatgttcctgctccaattctagtggaagtactgaataattttatgagagaatataaaagtattacgttttcaaaacaggagatgaatcagctgtaagctggtcttacggaaagctgattctgaaatgcaaacaactgatgggtgtcattttgtgttgtcaaattctgtactctctggccgacctgttgtagccaatgtgtaaacttgtgttaagaagctgatggtaatgagctactctaaaaagatttaagttttgctgtggatttggtgggtgtacttacagcattgccctgcttatccactctctcgcttttttttgtgaccccccttcctaaaatgaggtaaactgtagccatcagtttttttatttgttttctttttttgaggcgaagtcttgctctgttgcccaggctggagtgcagtggtgtgatcttggcttactgcaatctctgcctcctgggtccaagcgattctcctgcctcagcctcccaagtagctgggattacaggcgcccactaccatgccaggctaatttttttgtatttttagtagaggcggggttccaccatgttggccaggctggtctcgtactcctgacctcaggtgatcacctgcctcctcggcctcccaaaatgctgggattacaagcgtgagccaccgcgcctggcaccatcagtttttgatcctgatacttgtctgtcctcttggttctcctcatccctaatttaaccttgaacacaaaattcaacaggttttggcatatagaataaagattatcaggcaaaggcgcactcttgacctaatgatatatctacatttcatttcctgatctatcagcaatattaattgtctagaatgatgagaagtttagagaagttccatgactttgaaattttctttctttacctaggttatctaaattacaatttgaaactcatataagatcatgaagctaagcttaaataaaccgcattttgttgaaaatgaatacatatgtactatattgtattcatggtatgtggttgtatggatattgtttacatatgtttggataaataggttcaggtatctatctcagtaacgtaagaaaaaatgaatggtatctatggattgaactcctcatatatatgttcttttcttttctttttcttttttttttggagacagagtctcactctgttgcccaggctggagtgcacagtggtgcaatctcggctcactgcaacctccgccttccgggtttaagcaattctcctgcctcagcctcctgagtagttgggattacaggtgtgtgccactatgcccggctagtgtttgtatttttagtagaaacgaggttttaccatgttggccaggctggtctcaaactcctgacctcaagtgatccacccaccttgcctcccaaagtgctgagattacaggcatgagccactgcgcccagcctgaactcatatgtcctaaaccaaaggaggcatttatatttaatatgacatagtcactgtggagttttgacgtattactgcatttgtatttctatcttttttgcttttatgtgaaagttccacagaaacagacacttccagttgctcccagaactcgaacttctcaagaagaattgctagcagaagtggtccagggacaaagtaggacccccagaataagtccccccattaaagaagaggaaacaaaaggagattctgtagaaaaaaatcaaggtaataacttaaatgatgtttcactctttactacagttttttcatgaggcattgaatattttccaatggatttttatgaaatattacactatgaaaaaagtgatgattaagcccagaaatagaatgagaagaataccatgaggaaggttcataccaacacttcagaaaaaaattttttttttaaagaggtagggtcttgctgtgttgcccaggcagtcctcaaactcctgggctcaagcagtcctcctgcctcagcatccttagtagctggaggtgtgtacaagtgtgtgccactgcacccagccctttctagaaatttttgaaagtctttttattgtggaaatttttaatattctcaaaaatggaaaggctagtacagtgaactctcatgaacccagtcattaagccttagttattatcagaattttgctggtctttagatagctccttcttaaagatatatttatttctgcattctttctttttctctttttgttgatcctgcccgtttacctgaacttgaaattttagttacctttaaatctcccgtctcttaagcatcctgtctctgacctcccatatgtgtcccagcaaccctaatttatcccctcgtgcctaacatacttcagtttgcttccaggttttttttttttttttttttttttgcttttttctcagctttctcccccaattcctatacaatcttttgactttgaaagtgtgtctctcatcttctgactcctttgtgaaagtatctctcccctcctcctcattacccagaactaacgctattagtttggacttttggtgtctgttatctgacccctgggcctgcacagcccttctccatgactcttcagaccttttgtctcttttgtcgtcaagaaggattcttttttcttctgtttctttttctactaagatttgaattttaagaccccaccaaaaaaatctatatgcttattatgttatttctcacatacttttcaagaaccttggaatatattttttcatttcttcaaaactgtcctttaaattgttccaggtttcatgaaaccttatgatttcagaattgtcaattctgtatttgtttcctcattgtgtctctttaaaaatttttgactgtattgttcagtttgccatgacagcgttatatactattctgataattgataggcctgaggacaagacctgtttggtccccaaacagcagataggtaccaattggaaaatgtgaatgggccaaattgagaagaggagctgaaactgaggagggattttgctcagtgcagtggcagatgaggctgatctaaaaggactgcagtggtctactccctgtggagtctgtagtgtgttgcaccaaggttttcttcaaacacaggactctacgtgagagtcttggagtggaatcagatggagcagggaaacagacaatagagaaaaggaaagaatgtcagataaaaataggagaggaaaacaataggaaatctcaaagcaaggtgccatattttttaacatcacaaaatcaacagaagaaggttgttgattctgaagttagaatagctatccaaagcaaactttcccctaaaatgaacaacagaaaagtatcaaggtcaagtcctgtgccgaattaaaagataaaagggaataaaagacaaaacagcattgtttcaatgaaagcatgctgaaaggtataccaaaaagaaatacaatttcaaagtgagctagaagacattatttaaataatacaagacaaagccaagaaaaacataaaacagaagaactttgaggctgggtgcagtggctcatgcctgtaatcccaacactttgggaggctgaggcaggaggatcacttgagactagcctgggcagcatagcaaaaccctgtctcgacaaaaaataaaaatattagctgggcaaggtatacacctgtagtcctgtctccttgggaggctgaagtgggaggattgctggagcccgggaggctgaggtgggaggattgctggagcccaggaggctgaggttgcagtgagccacgatcataccattgccctccagggaggctgaggtgggaggattgctggagcccaggaggctgaggttgcagtgagccatgatcatgccattgccatctagtttgggcgatagagtgagactgtgtctcaaaataaatgaagactaaattagaaagaactcgaaagaattagtgcgtcttaataaaataaaacatgcgtgtaatcccagcaatttgggaggccaaggcgggaggatcacttgaggccaggagttgaagatcagccagggcaacatagcaaaaccttatggctacagaaaacagcaatttaaaaataaataaaattaaaacatcttcagagaaattgaagataaaagacaagaacattttaaaagtctaaaagggctcatgagaaagtggcaaatattgataataggcaatagaaatacagtgtttttatagtaggaatctccaaagaaacaatattcagaggaacagagcaaacattaactgtctttcaagaaaactttcatgaagtgaaaacatgtttgaaactgttgtctgaaaaattgtacagtatacctgagaatatttacccagaaccataacactaagatgtattatataattaatgaaattttaaaaagaaaaaaaatgatttggacattcaggcaaaaggggcacatgacttagaagaaaaggaaaggtagattatcatcaaacttttcaacagcatcacttttgtgctggaagaaaatggactagcatatttaagatactccagaaaagaaaatgtgagccaagaatttaatgtccagcaaaagtgacctttagaagtgatccagcaccaactgttatctatatgcagaaattcagagactcattcccatgaacttttcttaggaaatctaatggaggatgagcttcagacaagtaaaagcctgttgtcctgaatttacattggaaatgtttcggaactcacagtgtattttatatataaatacatttttttctagttctgtctactagaaggcatagaaacattcatcaacccttagcatcatctgtagttcccagattgtggtcttggaatacttcctatttaaaaaactaggcttcttgggctgggtgcagttgctcacgcctgtaatcccagcactttgggaagccgaggtgggcagatcacctgaggtcaggagttcaaaagcagcctggccagtgtggtgaaaccccatctctactaaaaatacaaaaaaattagctgggtgttgtggtgtgcgcctgtagtcctagctactcgggaggctgagccaggagaatcgcttggatccgggaggcggaggttgcagtgagccaagattgtgccaccgtactccagcctgggcaacagagtgagattccgtctcaagaaaaaataaaaataaaaaaacaaagaactaggcttcttgagaaatgtctttttccaggtctggggcaggaaatgttaacatgatcctggaatggctcaacatcccagatagcaaagaagctgtcaatgaatggtagaccacgtccaaaggatgcaggcgccaacttagaggtttccattggccaaaaatggaattatttgagattcagtaggtgtaaatatcgcggtgaattaaagcccatttaaatccacaatttcataatgacattttaaaaaaataagctctaactagtcaccttctggaaggtagtagataatcattcattgtcttgaaaactgggtaaataaaataattgaacatttatgctgtcttttctgtgagaacgataccactgggtaaccccataggacaggagttggcatctgttggaaccaaaccgtgcctattcatgtatgtattgtccgtggctactttcatactacagccttagttgaatagttgcaacagaccatatagcttgcatagcctaaaatagcctaaaagatttgccaacctctgatatagtagatgagagaaacattttcttttaaaatgatttcagctgataagagaacaagatggtaggattagagttatgcttttaagagtgaaaaccagttgttttgtgcctcttgatacaaaagaacagaacttttgtcttgccaaaaatgtaaacctaagtcatcaagctcccagtccagcagtcagtttgcaagaagttgcagaggccagaggagtatgttggttgagcttcaccatgagtgtgcagccggaaaaatagtgtttgggacactgtgggttgaatagcctgagaaattgagattaaaaggcaaatcaaaggaaaataaaaggagcaggattaaattgtagtggctagggatacccagtgtgtgtgaaattataaagaacctctaggcgttaatataaaaagcacatagtggttgcttttgaagaggaccgataaagatggagcacacagagaggcttctggggtggcagatgacgttctctcttttgacttggatggtagtcagaagggtgttttgccttacaaaaattcattaagctatatgtttgtgtggttttctatactgtgttttaaaaggggataattgaaatggtgtcaggtacctttgctgatgaggagtttggtattactagatatattcacaagtgtgaagtgatactgcaagcaactgttatctgttaatgtggttactcactgttgtacggtataatctggggcaggtttttaaaatataaacatgcactcgtattggcataagttgttaattttttttcttcttttgtttgagcagatagcattctctcatttctctggtgtctttatttttactagcgcacccacctcataatatgtgtactttttgctttttgtcttgccatcagtctgtcactagaagtttattttgccgatcttttcaaagacttaacaacattattctggctttattgatttttttttttttttggtgtttttgttttctatttcattgacttgtgctttttttttattttttttttttaagaggcgaggtctcactgtcacctaggctagagtacagtggcacaattgtagctcactgcaacctcaaatgcctgggctcaaatgatcctcccacctcagggaccataggcacacgccaccacgcccagctaatgtttaagtttttttgtaaagatggagtctcactatgttgcccaggctggtctggaactcctgagctcaagcagccctcttgcctcagcctcccaaagtgctaggtttacaggtgtgagccactgcacctggcccgacttctcttttaatttatccttccatattttaaaaattatttacctcaggctgtcttcttctcaaatgtaagcatttgagaagaatacatatgacaggttttaattcatcatgttttcattatcagagtgtctttaatttccattataattttcatcattgaaagtgtgttttctatacagtatttggaagtggtatgtgtttttgtcttttaatcctttttattatagacacctgacttaattgcattgtggttagataatgtaatttttacaatgcatagtttttgaaaattgttaacacttgcttagtgcataatcaagtttatgcatcttccacatgcattttggaagaaagtggactaattattggatggggaattttacatttattcagtagataaagctctactgttaacattattcaaatcttgaccttgctgagtttttgtgctgcttgacttaccacttgagaaagggtgttgaaattgcccaacatgatgacagatttatcttaatttctcttgtacttatatcaagtttttgctttatttttaggctgttatatactattaggtgcatacatatttaaatttgttatatcttctctgcaaattgaatcccttatcttgatttatgaccctctgcaaaaaagatgtttttatctcaaagtcagttttgcctgatattaatatagccatttaattatatttgctttatatatctggtttccctgcctttgttttcagttttctctctcatgctttaggtatatacagttgacccttgaaccagacaagtttgaactgtgtgggtccactcatacacttatatgtggatttttgaaaataaatatattggaaatattttttgagatgtggcaatttgaaaaaacttgtagataaactatatagcctagaaatagtgacaaaattaagaaaaatttaggtatgtcatgaacacataaaatatatgtagctactagactaacatttactatcttaaaacatacacatctattatgaagtttaatttatcaaaatatatgcacacaaacacagactttacatgataccgcttgtagttgagagaaatgtaagcaaacataaagatgcagtaatagctacataagatttactatagtacatactgtactactgtaataattttgtagttacctcctgttgctttatggtaagctaaggtgttttgagtgtccacttaaaatgctgtgtgatgcaaccatctctgcgacagttcagctctccagtaaattgtgaattgcagtgaaaggtgatctcgcagttcttgcatatttttcatcatgtttagtgcaatactgtaaaccttgaataacaccaggggacccataatgtgctactggtgatgctggacatgctcccaagaagtagagaaaagtcatgacattacaagaaaccattgctcagtatgtaccaaagatacatgttacaactgtggctgcagttattcaccatttctggataaatgaatttaacataagaaccatggttaaaaaaaaaagaaaaagaaaaaaatgtatgaagctgccactgcagctacgttggcaacagtaagtagttaaatgtttgggaagtcaaaagttgtatgtgggttttcaactgttgttgggggattggttcccttagccctcatattgtttaagggtcaactatatattatatcttaaatattataaagctggattttgttttttaatctcatctgagtttgccttttattggagagtttagaccagtcacatttattacaattactggtatagttggattactttctgtcatcattgctgatttgcatttgcctgcttttctgttttttctcatgttttttaaggttcattaattactgttattgttgacaaccctaaccctggttctacaattttaaactagtttactgtttaaaccttccctttctgttctttttttttttttttgagacggagtctcactttgttgccaggctggagtgtagtagcgcgatctcggctcaccgcaacctccgactccttggttcaagtgattctcctgcctcagcctcccaagtagctgggattatagacgcccaccactacgcccagctaatttttgtatttttaatagagacgaggtttcaccatattggccaggatggtctcaatctcttgatctctgatcccctgaccttgttatctgcccgcttcagcctcccaaagtgttgggattataggtgtgagccaccatgcttggcctcatttctgttcttttagtcgttaccagtgaaattttaccacacaaatttaatttagtattctaaaagttaatatcctgaccccactctcaaacagtaaaaggacttttgaatacctatgaagagcttcagtctttatcctcctcatttacttgtttccagtgtttcaatttgatcttttttaaaatgcacaagttgggccgggtgcggtggctcatgcctgtaatcccagcactttgggaggctgaggcgggtggatcacctgaggtcaggagttcgagaccagcctgaccatatggtgaaaccctgtctctactaaaaatagaaaaattagccaggcatggtggcacacacctgtagtcccagctactcaggaggctgaggcagaagaatcgcttgaacccaggaggcagaggttgcagtgggctgagattgcgccgctgcactccagcctgagcgacaaagcgacactccttatcaaaaaaaataagtaaaataaaatacacaagttggacaacatttttgtaattttttccaggcaatgttttttgaggtttacctcctgtttatcattttacttattcttaacatctctgagtgttatttggggatcattattttccaatattttgaagtatttttgaagtatttttttggaagtttcactgaaacatgtctgttggcaatatattttccaagagtctattcacctgtgagtgttttctttctttgtgttcttgtgcagtagttttgctggatacccaaatctaggttgttagttatttgctctccacaccttatatatattattatcccactgtcttctgctttccattgttgagtggacttctatcattctaattgtctgtcgttcctttgtaggtgatctgtcctttctctctggctgctttcaagatcttctctttgtgtttgatgttctgcagtttcactacgatgtgtctaggcgtggatttccttttatttttcctgtttggtataatgtatggaagcatcccatatatttgaaataaaatgcattatgaaatacatgctcaccatagaaaatctggaaaaagaaagcatatcaatgtaatatctcctgatagatgagaaaataatcaaatagtataaaaaagattaaaaataaaaagcaacattccttacttcattcttctctatactagtcccactccgcagaatcccccacttttaaatgcttctgtttctttctccgtgttgtaataatatgctttatactgtttcttcattgaccaactagatagtacctgttgatttcttgctgtatgtcaggttctagcccatttatacttttcccttgcttccaagctcatacagcaaaatcaatttttaattcatttattggttactttagtaattttaagtagtaacttaaatatttcttgtctggttatatttcagtatattttgacttctgaaagatatgtatccttcaattcctttttttttttggaggtagagtctcacttttgtcacccaggctggagtgcagtggcgtaatcctggctcactgcaacctctgcctcctgggtttaagtgattctcctgcctcagcctccttagtagcttgggactacaggcacaccctgccacacctggaatttttaataaaatttttagtagagacagggtctcaccatcatgcccaggctggtctcaaactcctgagctcaggcagtctgcccaccttgtcctcccaaagtgctgggattacaggcataagccaccatgccaggcctctctttcaagtcttatattttctttcttgccgccacctacattctgtcctgcctccaccttctaaattgtcacctgttcttttatattgtcaaagctgatcaaatttacattttgttccctactttagttaagacttagtcgattgactctaagttgagaaacagtaagcatttacactgttaagactatttagtctgggcatggttggtggctcacacctgtaatcccagcactttaggaggctgaggtgggagatttgcttgagcctaggaatttgaggccagcgtgggcaacatagcgagaccctcatctatatatatattttaatgttttttaattagctgggtgtgatgatgtgcacctatagtcatggctactctggagaattgcttgagcccaggagttcgaggttacagtgagctgtgattgtgccagcctgggtgacagaccaagaccctgtctctaaaaataaaaaaaaaattttaaagactatataaatattacaaggccaaatttacattctgtttcttgtacagttttgtgtgggaactctctagagtttttttaatttttcccccttttttgtttcccttaggttcttcttttttcccttctttcattgcctacctgtactgtagcctaaaagtcttatcactctgtgctttgaaatctttgggtttcccactttttcttaggtaccttcctcctggagcctctctcctccttttctgacctcactgcttgctctaggcctgctcaaggccatcatcccgaggcgccctcctcccctgagtcggctctgcaattcctgaattccattttgtcttctcagtgcatttctccgttttgtaatcacgtcacaaagaaactccttaagaaagtatagaaggtaaattttctgagttcttggaaatctgaagctatccttgtacttgtttgatactttgactaggtacagaattataggttgaagtcattttcttcagaactttgaaggcatagtttcattatcttgaggcttcagtgttgatgctgagaacttggttgcccatcttattccattgtgtaatacctgggatttttttctccgggaacttttttttttctatgttcctggtgtctgaaatttcactgtggtatgtctagatgctagttaggtacattaggtacccttttaatttgaaaattcattctcttccgtgtgggaaatactcttgcattatttgttttaaaatttgctgtccttgttttcattgttctctggtggaaattctgttagttggatgataagcccttactttaatctgtcagttgtatattttttctctcttgatttttgacttgatcttgttggtctactcttgaatacttgcttgacttgatctttagtctccttactgaacattttaaaaatgtaggcaagcatattttttaatttccacaaactttttcttgttctatttttcatagtatcttactttgtggatacagaatcatctcaactgtctgaagatcctaattaaagggattttttttttcttttcaaggaattcactcttgtcttctaattaatggagtcagagtcagattttatgctttttttcttgctctttcgattatggaatttttttcaaaaacatctgcagatagtggttcctagtttaaggaaaggtagtgcagaggcttacctagaattgtgctgtgggctgagcttttctgcaggcaggtttagctttcaatgaagcagacaaggagctgcaattggccttgcagttgtagaggaatttcttgggggagcaggttggtatgcttacactcctactggttgtctattaaaaatattaaaattttgtcttttaaatgtctgtctctggcagtaccattcacaagccttcttctctgccttacatccttcttggtttttactcattgctgcaatctctcacagttggatggccctttgtttcatccaaattcaaggcttgatatatcatctctgcactgtgactctcacatttttatatctccagcctggaccttgccctgaattcctcatttctgtccaaccactttatatttcttcttggaggtgtaataaatcatttcaaacttgtccaaagctcaactatgaattttcctctcctgtctgttcttcctgtagtcttcctcattttagtttattggtgacttcacctttccagtttctgagacagaatcctgttgccattctttttttctctccttctcctttccttcctcttccctctctacctctgtctccctccttcccttgttccacctgtcagcctctacctccagatttatagaattcactaccgtttatcacttctgcctctaccacccatcaaagtcactgtctggccgggtgcggtggctcatgcctgtaatcccagcactttgggaggccgaggcgggtggatcatatgaggctaggagttcgagacctgcctggccggcatagtgaaaccccgtctctactaaaaatacaaatattagctgggcatgatggcacatgcctgtagtcccagctactcaggaggctgaggtacgagaattggttgaacctgggaggcggaggttacggtgagccgagatcatgccactgcactctagccttggtgacacagtgacactctgtctccaaaaaaaaaaaggcaaaaaaaagtcaccgtctgtgatttgccttggttacttgattattggaatagtgtgttcttacaaggtgtgcctgctttcaaacttgccttccttcagtccatcccacacagcagcagcagtgatcctttacactgtaaattagatcatgctactttgcagcttagaaccccccaggggctccctgtcacactgtaagtcacagtgttctgccttctcatcacccacctgcctccctctgctctggctccccgtgcttgctgctgctcctgcacactggcctgcttgtccttcaggacgttggaagagctgcgcgtctcagatgcttttgccctctcctgagaatgtttactttggatgttctcatatctcatccatgtgtcatctttgaggccttctctggccccatccccacactccctcttttctgaagctttatttttccccataacgtttgtcaccatcaaatacatattttatgtttttgtagtttaggtatttttatccgaacgtaggtctttatgttttaacgtgaattgttttcttttagcatgtatttttttgggggtcttgagagctacctccttccccgtctcaacagagtctgtcctttttgagcagggatttatgtgtttgttctgtatggctgttactgagtgcccagagcagtgtctggcatatagtagcaggagctcagtcagtgtttgttgtctgagtaaatgtcactcctgccttgcatctaacctgcagttttcacaggggctcatttgtggttttgcctgctgtgccttacagccagtatttgtccatatattttctattacccagagattgttgacatctcatctgctgcaccttgtaacccccatctctaaaccagtgatctccatcatatttttgacctgaaaatttttgtacagtagccatttttaagtatgtataccaatatatgtattttacttacgtacacatgctgtattgatatgaatattagaaaacataagaatagaaatctgccgggcttggtggctcacgcctgtaatcccagcaatttgagaggctgagacgggcagatcattaggtcaggagttcgagaccagcctggccaacatggtgaaccgccgtctctactaaaaatacaaaaattagccgggtgtggtgatgggtgcctgtaatcccagctacttgggaagctgaggcaggagaattgcttgaacctgggaggcggaggttgcagtgagccaagattgcgccactccactgtagcctgagcgacagggtgagactccatctcggaaaataaaataaaaaaagaacagaaacccaaagatcatagggtagagatgtagatattaagttctttaattcacttttatggactcttcagaaggagagattataattgtatatgcttgatacattgtgttggactggaagcactgtgaaagattcttagtcaaggggagattttacattcaaagaaaatggaaaatccccctgctttgctcggagggaagaactgcacttaaaagtttgatgtgtattggtgtcgtcttctaggcatttcttatatctgtgaacatgtgcaccctttgtatataaagtggaattacatgtttacttacgcacacacacacatgtacatataaagcaggaattatactacccagagttctctgtgacatttttgttccacttaatgtatcatgggagagtccttgagtgtggacctaggagccagactaccgaaggtgcagaccctgcagtttactagttgatttaacctttctgtaccctagtttcctaatctataaatgaagaataacggtagcatttacttcagagttcttggtaggagtaaatgttaaaatacataagctttctctgctgatgaatatttacactggagtcttaggaagggtccttgcttattttctattctaaagttgggctggacatagtgggccatatgggtgccatcagatgggctcttgtttctctgtgacccgttctgttagacctctttcctgcttttttccttgaggttgtttatctgtcctctagtgaaccagctggtttgcaggtggtgcttttctgagagtgtcttgctgttaacagttactatggatgtcatatgccagctggttctgttaaaaaaaagtctgtgaatccaaagccttgaattttgaacattattttctgtctggaattttgaagaactgattcataaagtggagaaatgaataaagatttttattttacaaattccagcacttagcattttctttattctgttactgtgacatctatttgggaaaccaaagactaccattctttataaggattcctttttttttttttttttttttttttttgagacagattctcactctgtcacccaggctgcagtgcagtggcgcagtctcactcaccgcagcctctgccttcccaggttcaggtgattctcatgcctcagcctcccgagtagctggaattacaggcatatgccaccacgcctggctaatttttgtatttttagtggagacagggttttgccatgttggccaggctggtcttgaactcctgacctcaagtgatccacctgccttggcctcccaaagtgctggaatgacaggtgtgggcctctgtgccaggccaggattcttcttttaagagactatagtgagcagcatctaccaacttgcatccttgtatgttgcatatcttatttgtttgcttggggagtaaaccaaagtaaaaacgtcctttgtcaaattaaggaccttacaagattttctgtgttaatggattggaagtctttactattctttttttttttttttgagatggagtctccctctgtcgcctaggctggagtgcagtggcacgatctctgcttattcagtctctgcctcccgggttcaagcgattctcctgcctcagcctcctgagtagctgggataacaggcgtgcgccaccacacctggctgatttttgtatttttagcagagacgggatttcgccacattggtcaggctggtctcgaactcctgacctcataatccacccaccttggcctcccaaaatgctgggattacaggcatgagtcaccacgcccagcctagatgtctttactattcttaagatggcagtagtccccaagttgatctatggattcaactcaatccctgtttaaaccccaaattgcttttttttgtagaaatcggcaggctgatcctaaaattcatatggaaataaaaagggactgagaatagccaaaactattgaaaaagagtaacgttggcaaggttatgttgcttgatttcaaaacttactacaaagctagagtaatgaagactgtgtggtactggcataaggatgaccatacagacccgtggaccggaattgagaatccagaaataaatgcatactttcacaacccatcaatttttggcagcggtgttaagacagtttattggcaaaagaataggtttttccacaggtgatgctgggacaactgaatatccacatgaaaagaatgaagttggaaccttatcttatgtcataaacaaaaataactcaaaatggatcaaaaacctaaacttcaaaactcttagggaaaaaaatagatatgtcttggattccagaatgatttcttaaatatgacaccaaaagcacaagcaaccaaaggaaaaaagataactcggacttcatcaaaatttagtatttttgtgtttcaaaagatactatcaaaaaaaaaaaagacaacaaaatgggagagaatatttaagaaacacctgtctaataatggtctagtattaagccaaggctgagttcttatttccccatccttaagtttacacgatactatattagtgaagttgaattctgtcattaccacatgtatcttgaaagaagtttgtgtggatcacgggtccagttactttctccgccctttccctccagaggatttgtcactctcaataatgttatatactaatttcaaggggaaatacaactcaaaacaaatcagaaatctgaagcttaaaaatgttatggtttagatgatgaaaagggaaaagtacatttaattcatatcatatttagatgtaaagcacttaatgttatattgcttaacctataaagtagcgcttcagtgctctcatcatatgaagtaaataatagaaaattctttgtgtgacacatgtctgttttcagccaatcagaaaccaggattattttgtatgtaataatagggtttactggaagaggagctatacagatggtacttagaggatgtagggccctacgtattagggcttcttagttgtagcgaagagcaattggtctggtacgtttagctttttcacatttagttttgaattctgactctagaaatgtacaaccccatcttttgaattacaggttttaagatgttatttgctcttaatacgtcttaaggtaacagccttgatcactgcttttactttcgatgaaataacttaatgagctgtgaagaaaaaattatcagattttaagggagagaattttatgaaaatgtctttgaggttcctgtcacctttatgagaatgtcttcaaagtttccatcaccacctctaccaatttttcttccaccggagccagtggacttaggttccataacaagctcctcttgttcactgaatgagctagacaatatttcccaccttttaaggaaaatatcagctgatatcaatgaaattaaaggaatgaaagcagctattttgacagtggaagcaaatctttttgatctaaatgttagagtgtccaagaatgaagcaaaaatttcatctttggaggttaaaatgaatgaatattcaacaacatatgaatgcaacagacagtttgaagatcaagaagaagatactgaatcacagtcaagaactactgatgtaaaaataatcggcttccttagaaacgttgagaaaggtaaactcttaatatatgatatgttctaggtacccatcctttgatctgtatctttccacgtatgttgactgtagctctgatgtggagggagcaagttacagagaacttgaatttttcatggacctttaatgacaaatttggattctgcttgatttagcttagcaatctagaattgatcagaattccatcctctttaatggagctctctaaaacgatgttttgaaaagacagatgaacctagagcaatgaagcaaaacttgaaatgtggaagtgtggtctttcatgtgtcttgtgaaattattttaaaatgtctcattctttcatcatgtactgttgatgtgaaggagacctgttgcagtatttggatggaaagagcattcttcctgtaacttttcacctcagttttccaagcttcccacaggaatgcaacttgacctaagtgtcatcttcgttacagttcctcagaatgtgtgtttttttatggtaataattctggaaggaattgacttttttgggacgcaccagtaaaatttcatataacttatgttttaaaggaaactaactgatacaatttcaaatcgagtataggttttaaaatttaaaaacaccttttaatgaaatgtggtgcttggtgggagatggcccacttaacatctttgcactgagtaagcaaagcctgtccttgtgaagccacctgtaatggatatacccaaaatcagcatgtgggcatcttagtaagatttcagtatttgcaaccctatcagttacatccctttgtacactgtagtgcagtaccttataatgagcaagtgagtgcctgatgtctgctaagcgctgtgggggctacagaaaagtgtgacattctcccatcctcaaggagcttaacatcaaatcgaggatggaaaaaaatcagttctttgtccctattttgtgcagtcagactgctgggcatattattgttaggaatagtgaacctaataggaattaatgttaggagcctattttagaagaaataagtagttgaacatcttttcttgtggaagaggcaaagaattattatcatgctttgctaacatagggtgtggattgtagagctgagtgtcttattgttttctttgcatgcatcgaagcccagagtttgtcttttaggaactcttgtttagatgatgagagtgttttgttttgctatttcgattatcttcaaaggtcatgagtgagtcgtgatggtaagagctcaggtgatggagggaggtgcttgccatgcttattgtgcagttggctgtgatgcgagctgctgggccacaaggtgccttttcctggattttccacccgtttgccacctttactttccccgcagaattcaaattcaggaaaactgatgtcctcatagagggagaaccaggagtgttttaaattggcatttgtggtttaaccctgagtacagccttttttgtcttacaggatatgtctttggtctataaatactattaaattgaattgttgaagctttaagttacttttaagacttcaagttaagaacccagaaggattgatttttgggaaccacatgctggtattgtctgtgttgtaagcttagtgaagttttaaaatttatattctaggaactcaacagaggcaattattatcccgactgcaaatcgacccagtaatggcagaaactctgcagatgagtcaaggttggtaatgtttcaagttgtactgtaatccagccatttcagttgccatttccatttcttacaccccatttaacgtatctcggatctcttagatcctgccctaagatgttatatttagatctgtgaaaatattttagggccaggagataagatctgcatttctttcatgttatatagtgttataattttttgcctcattggaaaactttgttcctttcacaccattccaagtgtgtccctagcactgtcggctgtcactctcctgctgtcaggagtgacctgcgtttctgatttaccctcccactctacccagcttttgtcattgccatgagtggcttttgtatcctgtttttcacctggttagccttatcctcttgtacttcattttggagtcttatcaccagggccacacctggaacttgttgttctagtgttctagagccactctagtttgcctgtctcctttcctctccccacagacacacatgccaggggctactccaggactggagctgacgccttcatttttattatctctgtcctcagtgcccagcccctgccagatgcatgttcaatgtcttaaaaatgactgcaggataaacacaggcaaccatgagagacccggaatcatctcagtccttctgtttcccctaagtctgtcttttgtgggaagctctggtccctagacccctctcagtcaggactccacagtcagtcactctgttccccgaccctcccccagctttccagctcagaaagtgtgcttttcctccctaagggtcagcctccaccagaggccagatcccactgggttggtgagccactggcatgtcacccactcctccaacttcattctctgcctcctgtcttctctctgtagaggtgttcagacattctctgcccgtgattttgctctctcatctcccagcagtccgtcctgcttcctccacaggagtatttgaaaaggttgacagccgagatctgtgtgtgggatccacttcatcagctcttgtgcatgttttctcttctgcctccttcagcttttcattgtacccatggtgcacgcagtttgaaatagcaagtagttctgtgaggcttatgaatgactgcagtccttagctcctatcacattttttattctaagatccctttgtttctgcatattctattaattttctaaaaacatactgattttgtgtacacaatactctttgttatttctctgtggtctgaaaggtggttttgacatttttcccctccctgcttcgtcttgttttctctaagtggtctgttttggctgtcttttatgctggaggttcccctctgatgtctggggatcctaggtggtcttacatttaagagtggagcactcagaaggtcactggtattctgggttcatgagttggggcatggggcactttgactttctgtttgaaactagaccctgtggtggaaagtgatttgtcctgcctgtctggtttgtgggcaccctgatgtcactgccttcaagactttcctctcaggctggtcagcttctccaaaacaaagtttttcaagtaatagcctggtagtcagagttctgcgagcttaagtggggaaagaaggctgggggaggcacctcaccattaattattatgtaatgtttatttaaccctcccccaaccattgtcagtccagtacttctttcatcatggctggtgtctcttggtccagggactctgttcttatcctctgaagagtctaaagctccactttctccaagggagaatgcatgcagtgggtaaagatttatcaggaaatctaattgcctttaaaaatttttaacagtgtaccttcaggtgattttgtcgtagcatctttctggcagagaccctaatgcttcatccataggcctctccgaagattatctacaggaaagcacatcaccagtcatcccaggtgtcttcagtgtagaggtcgggattggtgtggcaagcatcaaaaccaagaaaacagtggccaggtgcagtggctcacgcccataatcccagcacttggggaagccaaggcaggcagatcacttcaggtcaggagttccagaccagcctggccaacatggcgaaacccaatctctactaaaaaatacaaaaattagccaggcgtggtggtgcacatctgtaatcccagctactaaggaggctgaggcaggagccttgcttgaacccaggaggcggaggttgcagtgagctgagctcgcaccactgcactccagcctgggtgacagagcaagactgtctcaaacaaagaaaacagatacatggaattagagttgaagaagaactaactgcttcttggacacatctaatacacctcttttttgcctgccatttcttccatttcttcctaaggtccttttactgccagttcctgagcctttggagaatcttgtggtctgaattggattgcttcattattgccttagaattcagcttttacagatcccctgagttcttaatcatctgttttccactttgaaaatttctttttacacttattttctttgtgagtttatgctttcaaaacaaaaacaaaacccttattgacatttctgtgggctttcaggagggaacaaaaagtaaatgcatggggtcagcctgtggtctctactcagaagatgttacttactcccccgtctgtctggtctccatgtgacctgggctgctaacgttccgcttgcagagaggtgtgcgggagggaccggtgcacgctttcctcaaccctggagcatgttacacttgggttcccatactttctccaagctttgacctttcggcttccagttcactctgtctttattcttctcattccctttcattctcatgtgtcagcgcatctcctccattcctcctcaaaaggttagctttgctctctcccaccttcagcattattttcatctcttctgtgttcacccaacctatgaactggtagaactccttcgtctcagaaagtgcagagtggtgggaaggagtgaagcagcccctgggccactgttgggacccacctttgacagttgtgagacctcggtgaatcatttaataacttggagctgcaaacagtcatctgtaacatgggaggaaaccgactttgtaggctttgagtgaggattcagtgagagacggccaccctgaatatgttaaacacttctgtcaccttcggttttgactcagcatcttatttctgtccccccacctacaggtcaaatctgaattttctacttcctcttaaacatgggagagtcccacaaagactttaaatctaacatggaaatgtatctttgccccttttaactttgctctttttcttttgctaagtttctcatcccagctttctcttccgcctgtctccctttaccatctgtactgcccttgctggggaaggcgggcacgccccttcccaggatggagcatgtcttctcttcctgtcaggtgtgtgagaccaggacagacagcagagaatcttttcattcagagcctcaccctctgtcccgggcaacagcaggtcgagaactctggttcttccttaacactgtttttctaaaaaccagtttgatcaggccacttccttccttaggaacctctcttgatttcttttctcttttttttttttttggtttgagatggagtctccctctgtcactcgtgctggagtgcagtggcacaatcctgctcattgcagccttgacctcctgggcccaagcacttctcccacctcagcctcccaagtagctgggactgcgggcatgtgctcccacgcctggctaattttatttatttatttattttctggttgatgggaggtctcactatgttgcctaggccggtctcaaactcctgggcttatggaatccttgtgccttggcctcccagaatgttgggattacagacatgaaccgccacaccaggccacttgatttcttactaattatagaccagaatcgagagtcactgagacatagaagaacctttattatatgtgtcagccttccttggtatgtactgctgagcccaccacacacacccttccagccattccacattctaacctttctcagatgccttcggccttgtgaaagcccctttccttctacgtgcgttttcctctgcctgaagtgctgtgttcgtttctccgagtctctctccttgtttattcctgcttgttcctttactgctgacttcagatgttcctccttgctaagcttttcgttggttcttggctggagtgggctgttctgtattctcagcaccttgttcacatcccttttgggtcatgctattctgaaattgtatatgtgtctgtttttctttttttctttgtgtatctagctcagttctcttagttgttcagtaaatactcagtgaatgaacataaatgaataccctgtaaattttggtctctaagctttaaaagaagtgtattaacttcagtccgttgatggcgtattgataggtcagccattctgggttgtaggtcttggcatattttataaaatagtagatgatgtgagcttatggttatttgcattaaaggccagtgtttttcttgatacatatgtttaagtgtccattcacctttcagttaccttttaaagtagtcctcggtttataaccaactggaaattataccacttgaattctttttatcaggacatgattctaagtggtactgtgcgaagtgaacaaaccagattttggaaaagtggttcagcagtctgtgtattctaattatagggagcattaggactcaaattctccaggtttttagaaaagatttttgtactttaagggtatattgttaatatctgttgagatgcctcacctgagaacctttctctgctgtggttagggagtgttaatcagaatcacttgtgccgtgccctacgcgagaaggactccttgagttctttgaaaacatgtttggaatagaattatagccctgttttcctgagtggaaccagttgtgattttcctttgaaataatttgaatatataaaagattgacattcttctcacatatataatgttgggaatgtaaggtatattcaaaagtaaacatttgtggccaatttttttggctcagattactatgacatggaatccatggtccatgcagacacaagatcatttattctgaagaagccaaagctgtctgaggaagtagtagtggcaccaaaccaagagtcggggatgaagactgcagattcccttcgggtactttcaggacaccttatgcagacacggtagatggtttctttttcttgtgtagttaatttgtgtgattagatagtaaaggttaaccattcgtttgcagcttccctcctccccgccctaaccgctagcgtagagtgctttcattgattcagtagctagcccatgaatagttagccaaattcagttttcaagaattccagttcatctttcttgttcagaaatccattaacctacaaattacaactcagtgtatgatttaactctattaaagattcttttctttatgcaaattcaggaaatgcaagtttaaaagccagctgaccataatcaggtcagctctaaagagagttggcagatcaggtttgggtgatttttcccttagaaaattgactgtttctataaaagaagaaacatacagataattagcataaatgctgctggcccttgtgttctgagcattgatgctaattttttggtttgtttccatgttgaccctatgaagatcgaatgggtgatggggtcaggcttgaggggagattgtccttagtaagtacaggctggagggtcactggtgatgccactgtgactgttcatggccatcgtgtgttagcagagaacccaccagtgctgcacctggtagccctacctagtctttttttattgaaccaaacgcaaagccaagggagtgatagttctgctgaagagcactttagggggctcagcgttttgtgtttgtttccctaattctatggtattttttatctgtctggcagagatcttgtacaaccagataaacctgcaagtcccaagtttatagtgacgctggatggtgtccccagccccccaggatacatgtcagatcaagaggaggacatgtgctttgaaggaatgaaacccgtaaaccaaactgcagcctcaaacaagggactcagaggtctcctccacccacagcagttgcacttgctgagcaggcagcttgaggacccaaatggtagcttttctaacggtgtgttgagagctcagattttcagggtgctgtcattgtgaagggaatctttgacttgtttctctaccttgaatgaatattggttaaaggccttgcttttatttatattcagtaatggccttttttcttctttcagacaaacccaccaagtacatttcagactctttttcctgtgtctttttcataggtgggctgttactccagtttgaaaacggagttcagccatggaacctgagagacctcttccgcttatgctggctaaaggatgaaccaccattcttgttgccttctttacctttgtattttcttcagaaactgtactgccactttgcccttttatcagcaatagtctcttgcaattaacttgagagaaaaatttagatttgatgctatttctacctcagtgaaatttctttgaaaggagtttctcacctaatctatcaagatcttggaactgtttaaattaatgttgaagagtaatatttagcagaactcagatgaactcatttcagatagcaccatagtttttggcaggtgacagtttcttatcaccgtttctttcactgggtatcagtggtagctgcaacgccactgatcatttccattcatgatagagaatggtaattatgttccttatatcttctaaaatatttagaagcacctcttcattggcaggagggataattactcaatcttaaaagcgtacagattcaaaggaaaaacagtaatggattttgaaacatttccttgagtaatcctcttcttggaagagatatgaaaatgtattgaatacctttctcgatcattaaaaatagaatagacttcagagggaaatcatatgttagtggagcaataacacttagctttattttaattggttgcgtttcctactgtgaatcaatgacgtagtgtcgtggttttgattagtggagggagttgaaaatctgaccctatcaacaggaagaaaaacttaaaaaatagtaaaagctgcagtaggcagtcccgatttattgactctgtatgttttgtctaaagagaagactccagtgttttcactactcttgattttcaatttggtaccttaattttttggtctattaggatctggtttcatttaaatgtaggtgtccatatgaggctttatggggtatacatgtagcagcagtgacaccataaataatatgttagtaaaaattcttgccagtgctgtggccattgtgctgacagccatgatgagtggtgagcctcctttcccattgctttgactggggactcagtgtttccctgctgctcaaggatgaagctttgtaagattagcataggggtgtggctggagagactcctgcagaacagttctcaggagtctctagtctctgcaccacttcccctgtgagcagggagtttgaaactgcaattgcttctggttggttttatgttgggttgtttcaaggatgctaccaacaacaacatctgttttaacctgctgtcttttcactcactgtcatatggcagcacagattttatagcttgctttctttgttttttttttttttgagatagagtctctctgtcccccaggctggagtgcaatggagccatctcagctcactgcaacttctgccttccaggttgaaagccattcttctgcctcagtctcccaagtagctgggattacaggcatgcaccatcacacctggctaattttgtagtttaagtagagacggggttttaccatgttggtcaggctaatctccaactcctgacctcaagtgatccaccaacctcggcctcccaaagttctgggattacaggtgtgagccaccgtgcctggcctatagctttcaataaaaggtgaatttgcctcttaaaatttgaacagaaagttttaatagtttacaaagtcggtgtcagccagtgaagactaggggcatgaccttcgtatgacttaatgtttttaaaagaaagataaagtttctttgtaaggtattattgtaataatcacatttctttgtaaagtattatattgttcctgagtatctagctactttgctttccagctaggcttctcttgggtattctcttaatcttttatttgtactgggttcttgtgtatatattatagtctgctgtgtgtaatttattataggaaaagggtaagacacatttactttgcggggatgacacaaaaaacctgtaaaaattagagaaacttccagtcatctcacattttctttggaaccgattattcttgtatcttagaactaaaatgacttatactgttttgtttttagaaagggtatccctcctgttgcccaggctggagtgcattggcacagtcatggctcactgcagcctccacctcccaggctcaagtgattctcccacctcagcctcctgagtagttggttactacaggtgcacaccaccatgcctggctaattttttgtattttttgtagagatggggtttcaccatgttgcccaggctggtctgaaactcctgagctcaagtgatctgcccgcctcggcctcccaaagtgctggggttacaggcatgagccaccacatcctatttaaagcttaaataggacttttactatttttaaagtagcatagaaaactgtttgtatcaggcatagtcataattgctctttgatgctgctcctatctgggctgcatgactacatttgtgtgccttgttctcctgtagtgaggacagaatgtgggtcactggaacagtaagtactcatagaactagctgctgctgctattacgactggttgcctgttttgcattttttccgtttaatcatcagactctaaggaagacattattttctctttgtatagatgaggaaacagaattccaaaaagttagctaacatttgcacagagtgtctggctgagcaactaagtggcagagtcagattttaactgacctctggcaagaggactagaggaatacagttgaagtgatacttgctttcatgaacatgaatgtgaaccataatacataatacccatgatgctattttgtggggagtttaaggtgtctcagtccagaaattagcagctgattattgcctgtagctgtaattttacttattcagtgttatttaataaattgccagcattacaatttcgatgaaggcagatttttggcttactgaaacaggataaaaatctggcaacaggggtcccactttgccctgtcatagtaatcgaagctgtgattggatgtggcacagggagtggagtggatgggtgtgcacttgctttccaggctgctgctccccgtctgtcccttattgcatttatcatcttcagcccagtcagtcttgctgttaggggaactgcccagtctctgtaagtgatggcatttgtgaccccattgtaggtaaaaatgttttcccctttttagacattgctggctgagcgcggtggctcatgcctataatcccagcactttgggaggccgaggtgggtggatcgcttaagtcctggagttcaagaccagcctgggcaacgtggggaaaccctgtagccaggcgtggtggcacgtgctacttggtaggggctgaggtgggagtatcacttgagcctgggaggcagaggttgcagtgagccgagattacaccactggcacaccactgtactccatcctgggtgacagagcaggaccctgtcgtaaaaaaaaaaaaaaaaaaaaaaagtaaaagacattgctgagtttcgcacctggacttacagctcagcaggtgggaatccttttgtatttgggccactcatcatcttgctggcgtgtgaggattcacatctccttatcaccttacctgttttcagtttttatttaattttattagttccccacttgacgtccttctctatttttaattcagctatgaattagtattgagaattagaatttttggtgaaaaatttggccgtagttgcagagtcactgtcctctttccttttcacagtgagaactgttgtcttcttcctggcaaccttttataggattctatggccagtgttaatcccataatttgagctcacttattttatatgactgtacatttaacagaagattctaagacaggtttgagggaaatatgttaaaggtgctgtgtactgaattgatcataatgaatgaaatacttttatttcctttccctttgtagctgagatgagtgaactgagtgtggcacagaaaccagaaaaacttttggagcgctgcaagtactggcctgcttgtaaaaatggggatgagtgtgcctaccatcaccccatctcaccctgcaagtgagtaccatccccccatctcaccctgcaagtgagtaccatccccccatctcaccctgcaagtaccatcccccatctcacctggcaagtaccatcccatctcacccagcaagtaccatcccccacatctcaaccctcaagtgagtaccatcccatctcaccctgcaagtaccatcccatttcaccctgcaagtaccatcccccatctcaccctgcaagtaccatctccccatctcaccctgtaactaccatcccatctcaccctgcaagtgagtaccatccctgcatttcaccctgcaagtaccatctcatctcaccctgcaagtaccaccccctcatctcaccctgcaagtatcatcccccatctagccctgtaagtgcgagtaccatcccccatcttaccctgcaagtaccatcacccacttcaccctgcaagtaccatcccccacctcagcctgcaagtaccatcccccacctcagcctgcaagtaccatcccctatctcaccctgcaagtaccatccccatctcaccctgcaagtatcatcccccacctcaccctgcaagtaccatcccccatctcaccctgcaattgagtaccatcccccatctcaccctgcaagtaccatcccccatctcaccctgcaagtgagtaccatcccccatctcaccttgcaagtaccatcccccatctcaccctgcaagtaccatcccccatctcaccctgcaagtatcatctcaccctgcaagtgagtaccatccccccatctcatcctgcaagtaccatcccccatctcaccctgcaagtaccatcccccatctcaccctgcaagtaccatcccccatcttaccctgcaagtgaataccatccccatctcaccctgcaagtgaataccatccccatctcaccctgcaagtgaataccatcccccatctcaccctgcaagtgaataccatccccatctcatcctgcaagtgaataccatccccatctcaccctgcaagtcatagccagctgattttggctttcagtttagtgtctgtatcttacaccttattttgtttttgtttttctgtggacaagtttttagttttataactaaatggagtgacaattaccatggccctctccagagtagcgtatttcttgttcatgtatgtttgttgagaggcaagggtgggggggctttgtttgtgcctcggacctgtgagatactgaaatacctggggttccttaagaattctgtacgtttaagcagatgggtatatggtaactgccccagtttgtatgcattttggccacacgcagtatacacagattttgaggagttgagggaaaagttagttatgggtaatgaaaacattttggacttgggttaaatttttccttacaagctggctggctcaatgtaatgagctttatgagatggctttttggggcttcttttttttgccgggggtaggtcctatggatggaatcttcatttttaattcttttaaggaaatgatgtgggaataatacagctgtacatataaggagagtatgggatgagtctttttgtatcacaaagccttgcatagaggatgtgtttattgtattaatgagttcactgcataaaatatataccttttttattaagtggtgtgatttttatcacaaaagcttgtctttcttggtggcttggcttgagttaaaagcctgtgtttgtgttatcccaagctttggaataaatgattgtgtcctattttgatatatggtcttattttaaaatattctttttgttgctgttttttttgcatttctcaaaacaagtagtgatggggagtgtaaagagcccttatacacagaactaataatgcattgagaagattgaatatgaaatatgctttttttttgttttgtagagccttccccaattgtaaatttgctgaaaaatgtttgtttgttcacccaaattgtaaatatgatgcaaagtgtactaaaccagattgtcccttcactcatgtgagtagaagaattccagtactgtctccaaaaccaggtgagtgagtgactgtgctactacatttgggtaaaaaatataaaatggcattttgtgactgtaaatggaattgaacaaacaaaagatggtttcagaaataattttggcaggatcagttaatccaaccagtctttaaagagcaagtgtgcctatctgtagtattccgaagtattttgactagtgaatatataaaccttaccattctaatttaaaaatggttttcactttcaaaaaaaacatcagtagactgcattaaaaatgggttttccaaacagattggagatcagtcctggtttttattttgttagcagttgcaccaccagcaccaccttccagtagtcagctctgccgttacttccctgcttgtaagaagatggaatgtcccttctatcatccaaaagtaagaacttctattttctcaaatcaatttagtgacaacatctcaatttcctcatttaacttcttttttgtcagagttactacattggtgcaaaagtaattgcgatttttgccagtaaaactattaagttgttcctcgtcactgaacctccatctggccccttaggccaagtggtctgaaactgttcaatgttagtatcccaagcactcagtggggggaagcatatctttgctagtcacattttccattattccctgcatttaagtatatggatgggttttagcgggggctggggggcagtttgaacctaatgtcagaactgagatgaagaaatccagtaggtactgcttaaaaccatccaaacttgtactgatgatggttgatgaatctccagatgtttagttggtcaaaatgaattatctccttcttgccccggtagcttgaggaccatatgaaggccttcacttgcccccatctgtaactgggcgtagatgagggtactcagtgaagagtgtaagggataattagaagtttttgtggtatgctaaactaccttttgaaattgtacttgctgtgattctttgactagaattttgtgtctcaaggttaagtccatttttcaaggcttcactagtattaaaatggtccttatagatggaatctcttactctgttaatggttagggtgggctggttattgtctcctaagttgtatgttggccaggtgaggtgggtcaggcctgctatcctagtactttgggaggtagaggcagaagtggaaggatcgtttgagcccgggagtttgaaaccagcctaggcaacatttaagagaccccatctcttaaaaaaaaaaaaaacaggcttggtagcacacgcctgtagtcccagctactcgggagactgaggcaagaggtcatgccacttcactccagcctgggtgacagagtgagaccctgtctcaaataataaaataatgtgtttacttatattagccttgtggatattgttgaagctctgttatctctattcagcattgtaggtttaacactcaatgtacaagaccggactgcacattctaccatcccaccattaatgtcccaccacgacatgccttgaaatggattcgacctcaaaccaggtaaacattcaaattcgtttttctcatgtcagttcaaattcttttttctaatttgcagtttctaaatttataagcacacaaaattggaaactagactgttactttgaatttttttctttgctgtttaattatagaaggctcctttggcaaaataatttactacatgggctaaattttacattatccagtggttacttttttaacctagattatcttgctctgttgcccaggttggagtgcagtcacactatcatagctcactgcagcctcaaacccctgggttcaatccatcctcccacctgtagctgagactacaagcgtgtgcctctatacctggctaattttttttattttaagtagagatggggtcttgaactcctgagctgaagcgatatccttccaccgtggccttccaaagtaccaggattacaggcatgagccaccacacccagccagattttaacttctcattatatactacgcaaacatatactaaggccagcaggagtatatatatgtgtactgtacttgaatttcacatccattttcttcgacattagcaactgggagatactgaaaggaagtttcaaaatattttagtgtggccagaaaatttaattacatatggtattatcttttatctacctgacataattgaattatttttaaaaatctgccatttatattgtaatcttatgaccaaatatttattgcttaaaactagtcaactttttaaactgagatatatggtatatatggatacaaagcagataattaaaacaatttttggttctgttcattcagcgaatagcacccagtcctgcctggcagaagatcatgcagtttggaagttttcatgtactgatgaaagatactctacagaacttgtcaaatctttgaaacttggaatatattgctttcataatatgaagttttattgcctatctatctgaagtgtctaatttttcaagtttgtaagtttattatgtggttttaacattgggtgtttttgttttgtttttactatgaaaagacagcttaaggaagagct

SEQ ID NO: 15894 - DNA, 39841 bp, Homo sapiens
cttctgataccaacatctttgatagtaacgtgccttcaaacaagagcaatttcagtcggggagatgagaggaggcatgaagctgcagtgccaccacttgccattcctagcgcgagacctgaaaaaagagattccagagtttctacaagttcgcaggagtcaaaaaccacaaatgtcaggtaagagtctggtgtagacctgctgggggcagatggctctgtgtatgtgacatttatattagtttttatatctttcagtttgctgttctcagcaatttttagaaacaatgaagtgatcgtgagtagttttttgaataaaataatggataagatctaagtatgattatcttttatcacaaatttagtaaatcaaagttgaaagaaagtgcaatttcaaagcagttttgaatggaatatgtaaagggagtatcctcagttttttcattgaaatttttcaagtaaacattctttaaagatttggtgataattgccctaatttggctgtaatacattttgttgttcttttaaatagacagacttacgatgatggagctgcaacccgactaatgtcaacagtgaaacctttgagggagccagcaccctctgaagatgtgattgatattaagccagaaccagatgatctcattgacgaagacctcaactttgtgcaggagaatcccttatctcagaaaaaacctacagtgacacttacatatggttcttctcgcccttctattgaaatttatcgaccacctgcaagtagaaatgcagatagtggtgttcatttaaacaggttgcaatttcaacagcagcagaatagtattcatgctgccaagcagcttgatatgcagagtagttgggtatatgaaacaggacgtttgtgtgaaccagaggtgcttaacagcttagaagaaacgtatagtccgttctttagaaacaactcggagaaaatgagtatggaggtttgtatgtacttttaaattctggcttaggctaaaaatcggcagttcttgataccaaataatatatgaagtaactaaacacatattccaaggctgggcacagtggctcacacctgtaatcccaggactttgggaggccgaggcgggtggatcacgaggtcaggagattgagaccatcctggctaacacggtgaaaccccgtctctactaaaaatacaaaaaattagccaggcatggtggcaggcgcctgtagtcccagctactcgggaggctgaggcaggagaatggcgtgaacctgggaggcggagcttgcactgagccaagatcgtgccactgcactccagcctgggcaacagagcgagactccgtctcaaccaaaaaagaaaaaacaaaaaacaaaaaaaacacatattccaaatttattttattttattttactttttgagaaggagtttcactcttgttgcccaggctggagtgtgatggcgcgatctcaactcactgcaacctccacctcctgggttcaagcgattctcctgcttcagcctcccgagtagctggtattacccgccaccatgcctggctaattttttgtatttttagcaaagacagggtttcaccgtgttggccaggctggtcttgaaatcctggccctgtgatccacccaccttgatcttggctcactgcaacctgtgcttcccaggttcaagtgattcttctgattcagcctcctgaatagctgggattacaggtgtgtactaccacgaccagctaatttttgtatttttagtagagatggtgtttcaccatgttggaccaggctggtcttgaactcctgacctcaggtgatctgccctccttggcctcccaaagtgttgggattacaggcatgtaccatggcgcctggccccaagtttatttttaaattgttttatctgctgtttctcatgctataccagattttcttccccatggcttgctcctagagttcttttgtatcacatctgtatacctttttgggatttccagcatttgagatattaatcttaaattaatttggggggtttcaatcaattttagattgttcatggtaattgctagtgagcaaccaattaactctgttttattagtttcctcaatagcactatatgcagctgttgataaaataaatgtaaagttctaatttttgttttagctaaaggttgactgttagggataatatttatatttatagtatttatttatttatttattttgatacggtgtctcactctgtcgcccaggctggagtgcagtggcatgatcttggctccctacatcctccacctcccgggttcaagtgagtcttctgcctcagcctcccgagtagctcggactacaggcacatgccgccacgctcagctaatttttgtatttttatagagacagggtttcaccatattggccaggctggtctcgaaatcctgaccttgtgatccgcccacttcggccttccaaagtgctaggattacagatgtgagccaccacacccagcctcatatttatatttttacataaaaccaagaaatactctgtgaatttctcatattactgtgtactgtttttttcttaaaatggaaacattttgtggtagaactcttgttattttctgagattaggtaagcataaattttatctgattgcaggatgaaaactttcggaagagaaagttgcctgtggtaagttcagttgttaaagtaaaaaaattcaatcatgatggagaagaggaggaagaagatgatgattacgggtctcgaacaggaagcatctccagcagtgtgtctgtgcctgcaaagcctgaaaggaggtaccttgaacatggctgtaaattaatctttaactgccttggtggagtcttcctgatttattgaagagaataatcacgaaaataatttttgtttgttttttgagacggagtctcgctctgtcaaccaggctggagtgcagtgccacgatctcggctcactgcaacctctgcctcccaggttcaagtgattctcctgattgagcctcctgaatagctgggattataggtgtgcactaccatgaccagctaatttttgtatttttagtagagatggtgtttcaccatgttggaccaggctggtctcgaactcctgacctcaggtgatctgccctcctcagcttcccaaagtgttgggattacaggcatgagccaccgcacctgacataaatatttaatgtaataccgtgtaagacttttccattgggttttgagaaacacgttaatgagagaaattgcttaacattggagaggattgcagagaatattgactaatatggtggggtgaggaggaacaacatcaattaagattcagatttattatttaaaaaaactaaaaggggcctaggcatggtggctcatgcctgtacctagcactttgggaggctgaggcaggaggattgcttgagaccaggagttcgagaccagcctgggcgatgtaatgagtctttgtctcttaaaaaaaattaaaataaattagttggtcattgtggcaggcacctgtagtcctggactggagaggtggatgtggaagcattgcttgagcctagaagtttaaggctgcagtgacatcacactccatcctgggtgagagagtaagagtctgtctaaaaaaaaaaataaggttccagtgtagttggcattttctaaaaactgcagctagtctgtttaaaacctagagaaggttgtggtaaaggcataatagatggctggcctgtgaggaactgaaatttaaagtttaataaaaatacctttcttaactcttttagaccttctcttccaccttctaaacaagctaacaagaatctgattttgaaggctatatctgaagctcaagaatccgtaacaaaaacaactaactactctacaggtaatttaaatgtattatgtttacacttggtaagacatttctgtaattcttgagtaaggtgaaaatgattgctccttaaattgtaaaataaaggtgcctgtcagatgtcaagaccaagatgaggttcccatatagaaaaatggctttaaaaggaaattgacaagtttgagaaacttcgccaactgttattggactgtagtttttcaagcaccatataatgccttttatatctttccaatgtgtgtaaaatatatagtacgtaaatattttgaagagaattttgatgaagtaggactttcatattagtagcattagattcaacattagatatgaatttacgatgtgtaaaggggagtacaattggacaatgataggtatctgaagttatagaaatttgttaaacagtagtatataaacaaggttggtttcttcccttttggcggaactcattagtagaatataaggcagagaattgactcatttgtgatgttcctgctccaattctagtggaagtactgaataattttatgagagaatataaaagtattacgttttcaaaacaggagatgaatcagctgtaagctggtcttacggaaagctgattctgaaatgcaaacaactgatgggtgtcattttgtgttgtcaaattctgtactctctggccgacctgttgtagccaatgtgtaaacttgtgttaagaagctgatggtaatgagctactctaaaaagatttaagttttgctgtggatttggtgggtgtacttacagcattgccctgcttatccactctctcgcttttttttgtgaccccccttcctaaaatgaggtaaactgtagccatcagtttttttatttgttttctttttttgaggcgaagtcttgctctgttgcccaggctggagtgcagtggtgtgatcttggcttactgcaatctctgcctcctgggtccaagcgattctcctgcctcagcctcccaagtagctgggattacaggcgcccactaccatgccaggctaatttttttgtatttttagtagaggcggggttccaccatgttggccaggctggtctcgtactcctgacctcaggtgatcacctgcctcctcggcctcccaaaatgctgggattacaagcgtgagccaccgcgcctggcaccatcagtttttgatcctgatacttgtctgtcctcttggttctcctcatccctaatttaaccttgaacacaaaattcaacaggttttggcatatagaataaagattatcaggcaaaggcgcactcttgacctaatgatatatctacatttcatttcctgatctatcagcaatattaattgtctagaatgatgagaagtttagagaagttccatgactttgaaattttctttctttacctaggttatctaaattacaatttgaaactcatataagatcatgaagctaagcttaaataaaccgcattttgttgaaaatgaatacatatgtactatattgtattcatggtatgtggttgtatggatattgtttacatatgtttggataaataggttcaggtatctatctcagtaacgtaagaaaaaatgaatggtatctatggattgaactcctcatatatatgttcttttcttttctttttcttttttttttggagacagagtctcactctgttgcccaggctggagtgcacagtggtgcaatctcggctcactgcaacctccgccttccgggtttaagcaattctcctgcctcagcctcctgagtagttgggattacaggtgtgtgccactatgcccggctagtgtttgtatttttagtagaaacgaggttttaccatgttggccaggctggtctcaaactcctgacctcaagtgatccacccaccttgcctcccaaagtgctgagattacaggcatgagccactgcgcccagcctgaactcatatgtcctaaaccaaaggaggcatttatatttaatatgacatagtcactgtggagttttgacgtattactgcatttgtatttctatcttttttgcttttatgtgaaagttccacagaaacagacacttccagttgctcccagaactcgaacttctcaagaagaattgctagcagaagtggtccagggacaaagtaggacccccagaataagtccccccattaaagaagaggaaacaaaaggagattctgtagaaaaaaatcaaggtaataacttaaatgatgtttcactctttactacagttttttcatgaggcattgaatattttccaatggatttttatgaaatattacactatgaaaaaagtgatgattaagcccagaaatagaatgagaagaataccatgaggaaggttcataccaacacttcagaaaaaaattttttttttaaagaggtagggtcttgctgtgttgcccaggcagtcctcaaactcctgggctcaagcagtcctcctgcctcagcatccttagtagctggaggtgtgtacaagtgtgtgccactgcacccagccctttctagaaatttttgaaagtctttttattgtggaaatttttaatattctcaaaaatggaaaggctagtacagtgaactctcatgaacccagtcattaagccttagttattatcagaattttgctggtctttagatagctccttcttaaagatatatttatttctgcattctttctttttctctttttgttgatcctgcccgtttacctgaacttgaaattttagttacctttaaatctcccgtctcttaagcatcctgtctctgacctcccatatgtgtcccagcaaccctaatttatcccctcgtgcctaacatacttcagtttgcttccaggttttttttttttttttttttttttgcttttttctcagctttctcccccaattcctatacaatcttttgactttgaaagtgtgtctctcatcttctgactcctttgtgaaagtatctctcccctcctcctcattacccagaactaacgctattagtttggacttttggtgtctgttatctgacccctgggcctgcacagcccttctccatgactcttcagaccttttgtctcttttgtcgtcaagaaggattcttttttcttctgtttctttttctactaagatttgaattttaagaccccaccaaaaaaatctatatgcttattatgttatttctcacatacttttcaagaaccttggaatatattttttcatttcttcaaaactgtcctttaaattgttccaggtttcatgaaaccttatgatttcagaattgtcaattctgtatttgtttcctcattgtgtctctttaaaaatttttgactgtattgttcagtttgccatgacagcgttatatactattctgataattgataggcctgaggacaagacctgtttggtccccaaacagcagataggtaccaattggaaaatgtgaatgggccaaattgagaagaggagctgaaactgaggagggattttgctcagtgcagtggcagatgaggctgatctaaaaggactgcagtggtctactccctgtggagtctgtagtgtgttgcaccaaggttttcttcaaacacaggactctacgtgagagtcttggagtggaatcagatggagcagggaaacagacaatagagaaaaggaaagaatgtcagataaaaataggagaggaaaacaataggaaatctcaaagcaaggtgccatattttttaacatcacaaaatcaacagaagaaggttgttgattctgaagttagaatagctatccaaagcaaactttcccctaaaatgaacaacagaaaagtatcaaggtcaagtcctgtgccgaattaaaagataaaagggaataaaagacaaaacagcattgtttcaatgaaagcatgctgaaaggtataccaaaaagaaatacaatttcaaagtgagctagaagacattatttaaataatacaagacaaagccaagaaaaacataaaacagaagaactttgaggctgggtgcagtggctcatgcctgtaatcccaacactttgggaggctgaggcaggaggatcacttgagactagcctgggcagcatagcaaaaccctgtctcgacaaaaaataaaaatattagctgggcaaggtatacacctgtagtcctgtctccttgggaggctgaagtgggaggattgctggagcccgggaggctgaggtgggaggattgctggagcccaggaggctgaggttgcagtgagccacgatcataccattgccctccagggaggctgaggtgggaggattgctggagcccaggaggctgaggttgcagtgagccatgatcatgccattgccatctagtttgggcgatagagtgagactgtgtctcaaaataaatgaagactaaattagaaagaactcgaaagaattagtgcgtcttaataaaataaaacatgcgtgtaatcccagcaatttgggaggccaaggcgggaggatcacttgaggccaggagttgaagatcagccagggcaacatagcaaaaccttatggctacagaaaacagcaatttaaaaataaataaaattaaaacatcttcagagaaattgaagataaaagacaagaacattttaaaagtctaaaagggctcatgagaaagtggcaaatattgataataggcaatagaaatacagtgtttttatagtaggaatctccaaagaaacaatattcagaggaacagagcaaacattaactgtctttcaagaaaactttcatgaagtgaaaacatgtttgaaactgttgtctgaaaaattgtacagtatacctgagaatatttacccagaaccataacactaagatgtattatataattaatgaaattttaaaaagaaaaaaaatgatttggacattcaggcaaaaggggcacatgacttagaagaaaaggaaaggtagattatcatcaaacttttcaacagcatcacttttgtgctggaagaaaatggactagcatatttaagatactccagaaaagaaaatgtgagccaagaatttaatgtccagcaaaagtgacctttagaagtgatccagcaccaactgttatctatatgcagaaattcagagactcattcccatgaacttttcttaggaaatctaatggaggatgagcttcagacaagtaaaagcctgttgtcctgaatttacattggaaatgtttcggaactcacagtgtattttatatataaatacatttttttctagttctgtctactagaaggcatagaaacattcatcaacccttagcatcatctgtagttcccagattgtggtcttggaatacttcctatttaaaaaactaggcttcttgggctgggtgcagttgctcacgcctgtaatcccagcactttgggaagccgaggtgggcagatcacctgaggtcaggagttcaaaagcagcctggccagtgtggtgaaaccccatctctactaaaaatacaaaaaaattagctgggtgttgtggtgtgcgcctgtagtcctagctactcgggaggctgagccaggagaatcgcttggatccgggaggcggaggttgcagtgagccaagattgtgccaccgtactccagcctgggcaacagagtgagattccgtctcaagaaaaaataaaaataaaaaaacaaagaactaggcttcttgagaaatgtctttttccaggtctggggcaggaaatgttaacatgatcctggaatggctcaacatcccagatagcaaagaagctgtcaatgaatggtagaccacgtccaaaggatgcaggcgccaacttagaggtttccattggccaaaaatggaattatttgagattcagtaggtgtaaatatcgcggtgaattaaagcccatttaaatccacaatttcataatgacattttaaaaaaataagctctaactagtcaccttctggaaggtagtagataatcattcattgtcttgaaaactgggtaaataaaataattgaacatttatgctgtcttttctgtgagaacgataccactgggtaaccccataggacaggagttggcatctgttggaaccaaaccgtgcctattcatgtatgtattgtccgtggctactttcatactacagccttagttgaatagttgcaacagaccatatagcttgcatagcctaaaatagcctaaaagatttgccaacctctgatatagtagatgagagaaacattttcttttaaaatgatttcagctgataagagaacaagatggtaggattagagttatgcttttaagagtgaaaaccagttgttttgtgcctcttgatacaaaagaacagaacttttgtcttgccaaaaatgtaaacctaagtcatcaagctcccagtccagcagtcagtttgcaagaagttgcagaggccagaggagtatgttggttgagcttcaccatgagtgtgcagccggaaaaatagtgtttgggacactgtgggttgaatagcctgagaaattgagattaaaaggcaaatcaaaggaaaataaaaggagcaggattaaattgtagtggctagggatacccagtgtgtgtgaaattataaagaacctctaggcgttaatataaaaagcacatagtggttgcttttgaagaggaccgataaagatggagcacacagagaggcttctggggtggcagatgacgttctctcttttgacttggatggtagtcagaagggtgttttgccttacaaaaattcattaagctatatgtttgtgtggttttctatactgtgttttaaaaggggataattgaaatggtgtcaggtacctttgctgatgaggagtttggtattactagatatattcacaagtgtgaagtgatactgcaagcaactgttatctgttaatgtggttactcactgttgtacggtataatctggggcaggtttttaaaatataaacatgcactcgtattggcataagttgttaattttttttcttcttttgtttgagcagatagcattctctcatttctctggtgtctttatttttactagcgcacccacctcataatatgtgtactttttgctttttgtcttgccatcagtctgtcactagaagtttattttgccgatcttttcaaagacttaacaacattattctggctttattgatttttttttttttttggtgtttttgttttctatttcattgacttgtgctttttttttattttttttttttaagaggcgaggtctcactgtcacctaggctagagtacagtggcacaattgtagctcactgcaacctcaaatgcctgggctcaaatgatcctcccacctcagggaccataggcacacgccaccacgcccagctaatgtttaagtttttttgtaaagatggagtctcactatgttgcccaggctggtctggaactcctgagctcaagcagccctcttgcctcagcctcccaaagtgctaggtttacaggtgtgagccactgcacctggcccgacttctcttttaatttatccttccatattttaaaaattatttacctcaggctgtcttcttctcaaatgtaagcatttgagaagaatacatatgacaggttttaattcatcatgttttcattatcagagtgtctttaatttccattataattttcatcattgaaagtgtgttttctatacagtatttggaagtggtatgtgtttttgtcttttaatcctttttattatagacacctgacttaattgcattgtggttagataatgtaatttttacaatgcatagtttttgaaaattgttaacacttgcttagtgcataatcaagtttatgcatcttccacatgcattttggaagaaagtggactaattattggatggggaattttacatttattcagtagataaagctctactgttaacattattcaaatcttgaccttgctgagtttttgtgctgcttgacttaccacttgagaaagggtgttgaaattgcccaacatgatgacagatttatcttaatttctcttgtacttatatcaagtttttgctttatttttaggctgttatatactattaggtgcatacatatttaaatttgttatatcttctctgcaaattgaatcccttatcttgatttatgaccctctgcaaaaaagatgtttttatctcaaagtcagttttgcctgatattaatatagccatttaattatatttgctttatatatctggtttccctgcctttgttttcagttttctctctcatgctttaggtatatacagttgacccttgaaccagacaagtttgaactgtgtgggtccactcatacacttatatgtggatttttgaaaataaatatattggaaatattttttgagatgtggcaatttgaaaaaacttgtagataaactatatagcctagaaatagtgacaaaattaagaaaaatttaggtatgtcatgaacacataaaatatatgtagctactagactaacatttactatcttaaaacatacacatctattatgaagtttaatttatcaaaatatatgcacacaaacacagactttacatgataccgcttgtagttgagagaaatgtaagcaaacataaagatgcagtaatagctacataagatttactatagtacatactgtactactgtaataattttgtagttacctcctgttgctttatggtaagctaaggtgttttgagtgtccacttaaaatgctgtgtgatgcaaccatctctgcgacagttcagctctccagtaaattgtgaattgcagtgaaaggtgatctcgcagttcttgcatatttttcatcatgtttagtgcaatactgtaaaccttgaataacaccaggggacccataatgtgctactggtgatgctggacatgctcccaagaagtagagaaaagtcatgacattacaagaaaccattgctcagtatgtaccaaagatacatgttacaactgtggctgcagttattcaccatttctggataaatgaatttaacataagaaccatggttaaaaaaaaaagaaaaagaaaaaaatgtatgaagctgccactgcagctacgttggcaacagtaagtagttaaatgtttgggaagtcaaaagttgtatgtgggttttcaactgttgttgggggattggttcccttagccctcatattgtttaagggtcaactatatattatatcttaaatattataaagctggattttgttttttaatctcatctgagtttgccttttattggagagtttagaccagtcacatttattacaattactggtatagttggattactttctgtcatcattgctgatttgcatttgcctgcttttctgttttttctcatgttttttaaggttcattaattactgttattgttgacaaccctaaccctggttctacaattttaaactagtttactgtttaaaccttccctttctgttctttttttttttttttgagacggagtctcactttgttgccaggctggagtgtagtagcgcgatctcggctcaccgcaacctccgactccttggttcaagtgattctcctgcctcagcctcccaagtagctgggattatagacgcccaccactacgcccagctaatttttgtatttttaatagagacgaggtttcaccatattggccaggatggtctcaatctcttgatctctgatcccctgaccttgttatctgcccgcttcagcctcccaaagtgttgggattataggtgtgagccaccatgcttggcctcatttctgttcttttagtcgttaccagtgaaattttaccacacaaatttaatttagtattctaaaagttaatatcctgaccccactctcaaacagtaaaaggacttttgaatacctatgaagagcttcagtctttatcctcctcatttacttgtttccagtgtttcaatttgatcttttttaaaatgcacaagttgggccgggtgcggtggctcatgcctgtaatcccagcactttgggaggctgaggcgggtggatcacctgaggtcaggagttcgagaccagcctgaccatatggtgaaaccctgtctctactaaaaatagaaaaattagccaggcatggtggcacacacctgtagtcccagctactcaggaggctgaggcagaagaatcgcttgaacccaggaggcagaggttgcagtgggctgagattgcgccgctgcactccagcctgagcgacaaagcgacactccttatcaaaaaaaataagtaaaataaaatacacaagttggacaacatttttgtaattttttccaggcaatgttttttgaggtttacctcctgtttatcattttacttattcttaacatctctgagtgttatttggggatcattattttccaatattttgaagtatttttgaagtatttttttggaagtttcactgaaacatgtctgttggcaatatattttccaagagtctattcacctgtgagtgttttctttctttgtgttcttgtgcagtagttttgctggatacccaaatctaggttgttagttatttgctctccacaccttatatatattattatcccactgtcttctgctttccattgttgagtggacttctatcattctaattgtctgtcgttcctttgtaggtgatctgtcctttctctctggctgctttcaagatcttctctttgtgtttgatgttctgcagtttcactacgatgtgtctaggcgtggatttccttttatttttcctgtttggtataatgtatggaagcatcccatatatttgaaataaaatgcattatgaaatacatgctcaccatagaaaatctggaaaaagaaagcatatcaatgtaatatctcctgatagatgagaaaataatcaaatagtataaaaaagattaaaaataaaaagcaacattccttacttcattcttctctatactagtcccactccgcagaatcccccacttttaaatgcttctgtttctttctccgtgttgtaataatatgctttatactgtttcttcattgaccaactagatagtacctgttgatttcttgctgtatgtcaggttctagcccatttatacttttcccttgcttccaagctcatacagcaaaatcaatttttaattcatttattggttactttagtaattttaagtagtaacttaaatatttcttgtctggttatatttcagtatattttgacttctgaaagatatgtatccttcaattcctttttttttttggaggtagagtctcacttttgtcacccaggctggagtgcagtggcgtaatcctggctcactgcaacctctgcctcctgggtttaagtgattctcctgcctcagcctccttagtagcttgggactacaggcacaccctgccacacctggaatttttaataaaatttttagtagagacagggtctcaccatcatgcccaggctggtctcaaactcctgagctcaggcagtctgcccaccttgtcctcccaaagtgctgggattacaggcataagccaccatgccaggcctctctttcaagtcttatattttctttcttgccgccacctacattctgtcctgcctccaccttctaaattgtcacctgttcttttatattgtcaaagctgatcaaatttacattttgttccctactttagttaagacttagtcgattgactctaagttgagaaacagtaagcatttacactgttaagactatttagtctgggcatggttggtggctcacacctgtaatcccagcactttaggaggctgaggtgggagatttgcttgagcctaggaatttgaggccagcgtgggcaacatagcgagaccctcatctatatatatattttaatgttttttaattagctgggtgtgatgatgtgcacctatagtcatggctactctggagaattgcttgagcccaggagttcgaggttacagtgagctgtgattgtgccagcctgggtgacagaccaagaccctgtctctaaaaataaaaaaaaaattttaaagactatataaatattacaaggccaaatttacattctgtttcttgtacagttttgtgtgggaactctctagagtttttttaatttttcccccttttttgtttcccttaggttcttcttttttcccttctttcattgcctacctgtactgtagcctaaaagtcttatcactctgtgctttgaaatctttgggtttcccactttttcttaggtaccttcctcctggagcctctctcctccttttctgacctcactgcttgctctaggcctgctcaaggccatcatcccgaggcgccctcctcccctgagtcggctctgcaattcctgaattccattttgtcttctcagtgcatttctccgttttgtaatcacgtcacaaagaaactccttaagaaagtatagaaggtaaattttctgagttcttggaaatctgaagctatccttgtacttgtttgatactttgactaggtacagaattataggttgaagtcattttcttcagaactttgaaggcatagtttcattatcttgaggcttcagtgttgatgctgagaacttggttgcccatcttattccattgtgtaatacctgggatttttttctccgggaacttttttttttctatgttcctggtgtctgaaatttcactgtggtatgtctagatgctagttaggtacattaggtacccttttaatttgaaaattcattctcttccgtgtgggaaatactcttgcattatttgttttaaaatttgctgtccttgttttcattgttctctggtggaaattctgttagttggatgataagcccttactttaatctgtcagttgtatattttttctctcttgatttttgacttgatcttgttggtctactcttgaatacttgcttgacttgatctttagtctccttactgaacattttaaaaatgtaggcaagcatattttttaatttccacaaactttttcttgttctatttttcatagtatcttactttgtggatacagaatcatctcaactgtctgaagatcctaattaaagggattttttttttcttttcaaggaattcactcttgtcttctaattaatggagtcagagtcagattttatgctttttttcttgctctttcgattatggaatttttttcaaaaacatctgcagatagtggttcctagtttaaggaaaggtagtgcagaggcttacctagaattgtgctgtgggctgagcttttctgcaggcaggtttagctttcaatgaagcagacaaggagctgcaattggccttgcagttgtagaggaatttcttgggggagcaggttggtatgcttacactcctactggttgtctattaaaaatattaaaattttgtcttttaaatgtctgtctctggcagtaccattcacaagccttcttctctgccttacatccttcttggtttttactcattgctgcaatctctcacagttggatggccctttgtttcatccaaattcaaggcttgatatatcatctctgcactgtgactctcacatttttatatctccagcctggaccttgccctgaattcctcatttctgtccaaccactttatatttcttcttggaggtgtaataaatcatttcaaacttgtccaaagctcaactatgaattttcctctcctgtctgttcttcctgtagtcttcctcattttagtttattggtgacttcacctttccagtttctgagacagaatcctgttgccattctttttttctctccttctcctttccttcctcttccctctctacctctgtctccctccttcccttgttccacctgtcagcctctacctccagatttatagaattcactaccgtttatcacttctgcctctaccacccatcaaagtcactgtctggccgggtgcggtggctcatgcctgtaatcccagcactttgggaggccgaggcgggtggatcatatgaggctaggagttcgagacctgcctggccggcatagtgaaaccccgtctctactaaaaatacaaatattagctgggcatgatggcacatgcctgtagtcccagctactcaggaggctgaggtacgagaattggttgaacctgggaggcggaggttacggtgagccgagatcatgccactgcactctagccttggtgacacagtgacactctgtctccaaaaaaaaaaaggcaaaaaaaagtcaccgtctgtgatttgccttggttacttgattattggaatagtgtgttcttacaaggtgtgcctgctttcaaacttgccttccttcagtccatcccacacagcagcagcagtgatcctttacactgtaaattagatcatgctactttgcagcttagaaccccccaggggctccctgtcacactgtaagtcacagtgttctgccttctcatcacccacctgcctccctctgctctggctccccgtgcttgctgctgctcctgcacactggcctgcttgtccttcaggacgttggaagagctgcgcgtctcagatgcttttgccctctcctgagaatgtttactttggatgttctcatatctcatccatgtgtcatctttgaggccttctctggccccatccccacactccctcttttctgaagctttatttttccccataacgtttgtcaccatcaaatacatattttatgtttttgtagtttaggtatttttatccgaacgtaggtctttatgttttaacgtgaattgttttcttttagcatgtatttttttgggggtcttgagagctacctccttccccgtctcaacagagtctgtcctttttgagcagggatttatgtgtttgttctgtatggctgttactgagtgcccagagcagtgtctggcatatagtagcaggagctcagtcagtgtttgttgtctgagtaaatgtcactcctgccttgcatctaacctgcagttttcacaggggctcatttgtggttttgcctgctgtgccttacagccagtatttgtccatatattttctattacccagagattgttgacatctcatctgctgcaccttgtaacccccatctctaaaccagtgatctccatcatatttttgacctgaaaatttttgtacagtagccatttttaagtatgtataccaatatatgtattttacttacgtacacatgctgtattgatatgaatattagaaaacataagaatagaaatctgccgggcttggtggctcacgcctgtaatcccagcaatttgagaggctgagacgggcagatcattaggtcaggagttcgagaccagcctggccaacatggtgaaccgccgtctctactaaaaatacaaaaattagccgggtgtggtgatgggtgcctgtaatcccagctacttgggaagctgaggcaggagaattgcttgaacctgggaggcggaggttgcagtgagccaagattgcgccactccactgtagcctgagcgacagggtgagactccatctcggaaaataaaataaaaaaagaacagaaacccaaagatcatagggtagagatgtagatattaagttctttaattcacttttatggactcttcagaaggagagattataattgtatatgcttgatacattgtgttggactggaagcactgtgaaagattcttagtcaaggggagattttacattcaaagaaaatggaaaatccccctgctttgctcggagggaagaactgcacttaaaagtttgatgtgtattggtgtcgtcttctaggcatttcttatatctgtgaacatgtgcaccctttgtatataaagtggaattacatgtttacttacgcacacacacacatgtacatataaagcaggaattatactacccagagttctctgtgacatttttgttccacttaatgtatcatgggagagtccttgagtgtggacctaggagccagactaccgaaggtgcagaccctgcagtttactagttgatttaacctttctgtaccctagtttcctaatctataaatgaagaataacggtagcatttacttcagagttcttggtaggagtaaatgttaaaatacataagctttctctgctgatgaatatttacactggagtcttaggaagggtccttgcttattttctattctaaagttgggctggacatagtgggccatatgggtgccatcagatgggctcttgtttctctgtgacccgttctgttagacctctttcctgcttttttccttgaggttgtttatctgtcctctagtgaaccagctggtttgcaggtggtgcttttctgagagtgtcttgctgttaacagttactatggatgtcatatgccagctggttctgttaaaaaaaagtctgtgaatccaaagccttgaattttgaacattattttctgtctggaattttgaagaactgattcataaagtggagaaatgaataaagatttttattttacaaattccagcacttagcattttctttattctgttactgtgacatctatttgggaaaccaaagactaccattctttataaggattcctttttttttttttttttttttttttttgagacagattctcactctgtcacccaggctgcagtgcagtggcgcagtctcactcaccgcagcctctgccttcccaggttcaggtgattctcatgcctcagcctcccgagtagctggaattacaggcatatgccaccacgcctggctaatttttgtatttttagtggagacagggttttgccatgttggccaggctggtcttgaactcctgacctcaagtgatccacctgccttggcctcccaaagtgctggaatgacaggtgtgggcctctgtgccaggccaggattcttcttttaagagactatagtgagcagcatctaccaacttgcatccttgtatgttgcatatcttatttgtttgcttggggagtaaaccaaagtaaaaacgtcctttgtcaaattaaggaccttacaagattttctgtgttaatggattggaagtctttactattctttttttttttttttgagatggagtctccctctgtcgcctaggctggagtgcagtggcacgatctctgcttattcagtctctgcctcccgggttcaagcgattctcctgcctcagcctcctgagtagctgggataacaggcgtgcgccaccacacctggctgatttttgtatttttagcagagacgggatttcgccacattggtcaggctggtctcgaactcctgacctcataatccacccaccttggcctcccaaaatgctgggattacaggcatgagtcaccacgcccagcctagatgtctttactattcttaagatggcagtagtccccaagttgatctatggattcaactcaatccctgtttaaaccccaaattgcttttttttgtagaaatcggcaggctgatcctaaaattcatatggaaataaaaagggactgagaatagccaaaactattgaaaaagagtaacgttggcaaggttatgttgcttgatttcaaaacttactacaaagctagagtaatgaagactgtgtggtactggcataaggatgaccatacagacccgtggaccggaattgagaatccagaaataaatgcatactttcacaacccatcaatttttggcagcggtgttaagacagtttattggcaaaagaataggtttttccacaggtgatgctgggacaactgaatatccacatgaaaagaatgaagttggaaccttatcttatgtcataaacaaaaataactcaaaatggatcaaaaacctaaacttcaaaactcttagggaaaaaaatagatatgtcttggattccagaatgatttcttaaatatgacaccaaaagcacaagcaaccaaaggaaaaaagataactcggacttcatcaaaatttagtatttttgtgtttcaaaagatactatcaaaaaaaaaaaagacaacaaaatgggagagaatatttaagaaacacctgtctaataatggtctagtattaagccaaggctgagttcttatttccccatccttaagtttacacgatactatattagtgaagttgaattctgtcattaccacatgtatcttgaaagaagtttgtgtggatcacgggtccagttactttctccgccctttccctccagaggatttgtcactctcaataatgttatatactaatttcaaggggaaatacaactcaaaacaaatcagaaatctgaagcttaaaaatgttatggtttagatgatgaaaagggaaaagtacatttaattcatatcatatttagatgtaaagcacttaatgttatattgcttaacctataaagtagcgcttcagtgctctcatcatatgaagtaaataatagaaaattctttgtgtgacacatgtctgttttcagccaatcagaaaccaggattattttgtatgtaataatagggtttactggaagaggagctatacagatggtacttagaggatgtagggccctacgtattagggcttcttagttgtagcgaagagcaattggtctggtacgtttagctttttcacatttagttttgaattctgactctagaaatgtacaaccccatcttttgaattacaggttttaagatgttatttgctcttaatacgtcttaaggtaacagccttgatcactgcttttactttcgatgaaataacttaatgagctgtgaagaaaaaattatcagattttaagggagagaattttatgaaaatgtctttgaggttcctgtcacctttatgagaatgtcttcaaagtttccatcaccacctctaccaatttttcttccaccggagccagtggacttaggttccataacaagctcctcttgttcactgaatgagctagacaatatttcccaccttttaaggaaaatatcagctgatatcaatgaaattaaaggaatgaaagcagctattttgacagtggaagcaaatctttttgatctaaatgttagagtgtccaagaatgaagcaaaaatttcatctttggaggttaaaatgaatgaatattcaacaacatatgaatgcaacagacagtttgaagatcaagaagaagatactgaatcacagtcaagaactactgatgtaaaaataatcggcttccttagaaacgttgagaaaggtaaactcttaatatatgatatgttctaggtacccatcctttgatctgtatctttccacgtatgttgactgtagctctgatgtggagggagcaagttacagagaacttgaatttttcatggacctttaatgacaaatttggattctgcttgatttagcttagcaatctagaattgatcagaattccatcctctttaatggagctctctaaaacgatgttttgaaaagacagatgaacctagagcaatgaagcaaaacttgaaatgtggaagtgtggtctttcatgtgtcttgtgaaattattttaaaatgtctcattctttcatcatgtactgttgatgtgaaggagacctgttgcagtatttggatggaaagagcattcttcctgtaacttttcacctcagttttccaagcttcccacaggaatgcaacttgacctaagtgtcatcttcgttacagttcctcagaatgtgtgtttttttatggtaataattctggaaggaattgacttttttgggacgcaccagtaaaatttcatataacttatgttttaaaggaaactaactgatacaatttcaaatcgagtataggttttaaaatttaaaaacaccttttaatgaaatgtggtgcttggtgggagatggcccacttaacatctttgcactgagtaagcaaagcctgtccttgtgaagccacctgtaatggatatacccaaaatcagcatgtgggcatcttagtaagatttcagtatttgcaaccctatcagttacatccctttgtacactgtagtgcagtaccttataatgagcaagtgagtgcctgatgtctgctaagcgctgtgggggctacagaaaagtgtgacattctcccatcctcaaggagcttaacatcaaatcgaggatggaaaaaaatcagttctttgtccctattttgtgcagtcagactgctgggcatattattgttaggaatagtgaacctaataggaattaatgttaggagcctattttagaagaaataagtagttgaacatcttttcttgtggaagaggcaaagaattattatcatgctttgctaacatagggtgtggattgtagagctgagtgtcttattgttttctttgcatgcatcgaagcccagagtttgtcttttaggaactcttgtttagatgatgagagtgttttgttttgctatttcgattatcttcaaaggtcatgagtgagtcgtgatggtaagagctcaggtgatggagggaggtgcttgccatgcttattgtgcagttggctgtgatgcgagctgctgggccacaaggtgccttttcctggattttccacccgtttgccacctttactttccccgcagaattcaaattcaggaaaactgatgtcctcatagagggagaaccaggagtgttttaaattggcatttgtggtttaaccctgagtacagccttttttgtcttacaggatatgtctttggtctataaatactattaaattgaattgttgaagctttaagttacttttaagacttcaagttaagaacccagaaggattgatttttgggaaccacatgctggtattgtctgtgttgtaagcttagtgaagttttaaaatttatattctaggaactcaacagaggcaattattatcccgactgcaaatcgacccagtaatggcagaaactctgcagatgagtcaaggttggtaatgtttcaagttgtactgtaatccagccatttcagttgccatttccatttcttacaccccatttaacgtatctcggatctcttagatcctgccctaagatgttatatttagatctgtgaaaatattttagggccaggagataagatctgcatttctttcatgttatatagtgttataattttttgcctcattggaaaactttgttcctttcacaccattccaagtgtgtccctagcactgtcggctgtcactctcctgctgtcaggagtgacctgcgtttctgatttaccctcccactctacccagcttttgtcattgccatgagtggcttttgtatcctgtttttcacctggttagccttatcctcttgtacttcattttggagtcttatcaccagggccacacctggaacttgttgttctagtgttctagagccactctagtttgcctgtctcctttcctctccccacagacacacatgccaggggctactccaggactggagctgacgccttcatttttattatctctgtcctcagtgcccagcccctgccagatgcatgttcaatgtcttaaaaatgactgcaggataaacacaggcaaccatgagagacccggaatcatctcagtccttctgtttcccctaagtctgtcttttgtgggaagctctggtccctagacccctctcagtcaggactccacagtcagtcactctgttccccgaccctcccccagctttccagctcagaaagtgtgcttttcctccctaagggtcagcctccaccagaggccagatcccactgggttggtgagccactggcatgtcacccactcctccaacttcattctctgcctcctgtcttctctctgtagaggtgttcagacattctctgcccgtgattttgctctctcatctcccagcagtccgtcctgcttcctccacaggagtatttgaaaaggttgacagccgagatctgtgtgtgggatccacttcatcagctcttgtgcatgttttctcttctgcctccttcagcttttcattgtacccatggtgcacgcagtttgaaatagcaagtagttctgtgaggcttatgaatgactgcagtccttagctcctatcacattttttattctaagatccctttgtttctgcatattctattaattttctaaaaacatactgattttgtgtacacaatactctttgttatttctctgtggtctgaaaggtggttttgacatttttcccctccctgcttcgtcttgttttctctaagtggtctgttttggctgtcttttatgctggaggttcccctctgatgtctggggatcctaggtggtcttacatttaagagtggagcactcagaaggtcactggtattctgggttcatgagttggggcatggggcactttgactttctgtttgaaactagaccctgtggtggaaagtgatttgtcctgcctgtctggtttgtgggcaccctgatgtcactgccttcaagactttcctctcaggctggtcagcttctccaaaacaaagtttttcaagtaatagcctggtagtcagagttctgcgagcttaagtggggaaagaaggctgggggaggcacctcaccattaattattatgtaatgtttatttaaccctcccccaaccattgtcagtccagtacttctttcatcatggctggtgtctcttggtccagggactctgttcttatcctctgaagagtctaaagctccactttctccaagggagaatgcatgcagtgggtaaagatttatcaggaaatctaattgcctttaaaaatttttaacagtgtaccttcaggtgattttgtcgtagcatctttctggcagagaccctaatgcttcatccataggcctctccgaagattatctacaggaaagcacatcaccagtcatcccaggtgtcttcagtgtagaggtcgggattggtgtggcaagcatcaaaaccaagaaaacagtggccaggtgcagtggctcacgcccataatcccagcacttggggaagccaaggcaggcagatcacttcaggtcaggagttccagaccagcctggccaacatggcgaaacccaatctctactaaaaaatacaaaaattagccaggcgtggtggtgcacatctgtaatcccagctactaaggaggctgaggcaggagccttgcttgaacccaggaggcggaggttgcagtgagctgagctcgcaccactgcactccagcctgggtgacagagcaagactgtctcaaacaaagaaaacagatacatggaattagagttgaagaagaactaactgcttcttggacacatctaatacacctcttttttgcctgccatttcttccatttcttcctaaggtccttttactgccagttcctgagcctttggagaatcttgtggtctgaattggattgcttcattattgccttagaattcagcttttacagatcccctgagttcttaatcatctgttttccactttgaaaatttctttttacacttattttctttgtgagtttatgctttcaaaacaaaaacaaaacccttattgacatttctgtgggctttcaggagggaacaaaaagtaaatgcatggggtcagcctgtggtctctactcagaagatgttacttactcccccgtctgtctggtctccatgtgacctgggctgctaacgttccgcttgcagagaggtgtgcgggagggaccggtgcacgctttcctcaaccctggagcatgttacacttgggttcccatactttctccaagctttgacctttcggcttccagttcactctgtctttattcttctcattccctttcattctcatgtgtcagcgcatctcctccattcctcctcaaaaggttagctttgctctctcccaccttcagcattattttcatctcttctgtgttcacccaacctatgaactggtagaactccttcgtctcagaaagtgcagagtggtgggaaggagtgaagcagcccctgggccactgttgggacccacctttgacagttgtgagacctcggtgaatcatttaataacttggagctgcaaacagtcatctgtaacatgggaggaaaccgactttgtaggctttgagtgaggattcagtgagagacggccaccctgaatatgttaaacacttctgtcaccttcggttttgactcagcatcttatttctgtccccccacctacaggtcaaatctgaattttctacttcctcttaaacatgggagagtcccacaaagactttaaatctaacatggaaatgtatctttgccccttttaactttgctctttttcttttgctaagtttctcatcccagctttctcttccgcctgtctccctttaccatctgtactgcccttgctggggaaggcgggcacgccccttcccaggatggagcatgtcttctcttcctgtcaggtgtgtgagaccaggacagacagcagagaatcttttcattcagagcctcaccctctgtcccgggcaacagcaggtcgagaactctggttcttccttaacactgtttttctaaaaaccagtttgatcaggccacttccttccttaggaacctctcttgatttcttttctcttttttttttttttggtttgagatggagtctccctctgtcactcgtgctggagtgcagtggcacaatcctgctcattgcagccttgacctcctgggcccaagcacttctcccacctcagcctcccaagtagctgggactgcgggcatgtgctcccacgcctggctaattttatttatttatttattttctggttgatgggaggtctcactatgttgcctaggccggtctcaaactcctgggcttatggaatccttgtgccttggcctcccagaatgttgggattacagacatgaaccgccacaccaggccacttgatttcttactaattatagaccagaatcgagagtcactgagacatagaagaacctttattatatgtgtcagccttccttggtatgtactgctgagcccaccacacacacccttccagccattccacattctaacctttctcagatgccttcggccttgtgaaagcccctttccttctacgtgcgttttcctctgcctgaagtgctgtgttcgtttctccgagtctctctccttgtttattcctgcttgttcctttactgctgacttcagatgttcctccttgctaagcttttcgttggttcttggctggagtgggctgttctgtattctcagcaccttgttcacatcccttttgggtcatgctattctgaaattgtatatgtgtctgtttttctttttttctttgtgtatctagctcagttctcttagttgttcagtaaatactcagtgaatgaacataaatgaataccctgtaaattttggtctctaagctttaaaagaagtgtattaacttcagtccgttgatggcgtattgataggtcagccattctgggttgtaggtcttggcatattttataaaatagtagatgatgtgagcttatggttatttgcattaaaggccagtgtttttcttgatacatatgtttaagtgtccattcacctttcagttaccttttaaagtagtcctcggtttataaccaactggaaattataccacttgaattctttttatcaggacatgattctaagtggtactgtgcgaagtgaacaaaccagattttggaaaagtggttcagcagtctgtgtattctaattatagggagcattaggactcaaattctccaggtttttagaaaagatttttgtactttaagggtatattgttaatatctgttgagatgcctcacctgagaacctttctctgctgtggttagggagtgttaatcagaatcacttgtgccgtgccctacgcgagaaggactccttgagttctttgaaaacatgtttggaatagaattatagccctgttttcctgagtggaaccagttgtgattttcctttgaaataatttgaatatataaaagattgacattcttctcacatatataatgttgggaatgtaaggtatattcaaaagtaaacatttgtggccaatttttttggctcagattactatgacatggaatccatggtccatgcagacacaagatcatttattctgaagaagccaaagctgtctgaggaagtagtagtggcaccaaaccaagagtcggggatgaagactgcagattcccttcgggtactttcaggacaccttatgcagacacggtagatggtttctttttcttgtgtagttaatttgtgtgattagatagtaaaggttaaccattcgtttgcagcttccctcctccccgccctaaccgctagcgtagagtgctttcattgattcagtagctagcccatgaatagttagccaaattcagttttcaagaattccagttcatctttcttgttcagaaatccattaacctacaaattacaactcagtgtatgatttaactctattaaagattcttttctttatgcaaattcaggaaatgcaagtttaaaagccagctgaccataatcaggtcagctctaaagagagttggcagatcaggtttgggtgatttttcccttagaaaattgactgtttctataaaagaagaaacatacagataattagcataaatgctgctggcccttgtgttctgagcattgatgctaattttttggtttgtttccatgttgaccctatgaagatcgaatgggtgatggggtcaggcttgaggggagattgtccttagtaagtacaggctggagggtcactggtgatgccactgtgactgttcatggccatcgtgtgttagcagagaacccaccagtgctgcacctggtagccctacctagtctttttttattgaaccaaacgcaaagccaagggagtgatagttctgctgaagagcactttagggggctcagcgttttgtgtttgtttccctaattctatggtattttttatctgtctggcagagatcttgtacaaccagataaacctgcaagtcccaagtttatagtgacgctggatggtgtccccagccccccaggatacatgtcagatcaagaggaggacatgtgctttgaaggaatgaaacccgtaaaccaaactgcagcctcaaacaagggactcagaggtctcctccacccacagcagttgcacttgctgagcaggcagcttgaggacccaaatggtagcttttctaacggtgtgttgagagctcagattttcagggtgctgtcattgtgaagggaatctttgacttgtttctctaccttgaatgaatattggttaaaggccttgcttttatttatattcagtaatggccttttttcttctttcagacaaacccaccaagtacatttcagactctttttcctgtgtctttttcataggtgggctgttactccagtttgaaaacggagttcagccatggaacctgagagacctcttccgcttatgctggctaaaggatgaaccaccattcttgttgccttctttacctttgtattttcttcagaaactgtactgccactttgcccttttatcagcaatagtctcttgcaattaacttgagagaaaaatttagatttgatgctatttctacctcagtgaaatttctttgaaaggagtttctcacctaatctatcaagatcttggaactgtttaaattaatgttgaagagtaatatttagcagaactcagatgaactcatttcagatagcaccatagtttttggcaggtgacagtttcttatcaccgtttctttcactgggtatcagtggtagctgcaacgccactgatcatttccattcatgatagagaatggtaattatgttccttatatcttctaaaatatttagaagcacctcttcattggcaggagggataattactcaatcttaaaagcgtacagattcaaaggaaaaacagtaatggattttgaaacatttccttgagtaatcctcttcttggaagagatatgaaaatgtattgaatacctttctcgatcattaaaaatagaatagacttcagagggaaatcatatgttagtggagcaataacacttagctttattttaattggttgcgtttcctactgtgaatcaatgacgtagtgtcgtggttttgattagtggagggagttgaaaatctgaccctatcaacaggaagaaaaacttaaaaaatagtaaaagctgcagtaggcagtcccgatttattgactctgtatgttttgtctaaagagaagactccagtgttttcactactcttgattttcaatttggtaccttaattttttggtctattaggatctggtttcatttaaatgtaggtgtccatatgaggctttatggggtatacatgtagcagcagtgacaccataaataatatgttagtaaaaattcttgccagtgctgtggccattgtgctgacagccatgatgagtggtgagcctcctttcccattgctttgactggggactcagtgtttccctgctgctcaaggatgaagctttgtaagattagcataggggtgtggctggagagactcctgcagaacagttctcaggagtctctagtctctgcaccacttcccctgtgagcagggagtttgaaactgcaattgcttctggttggttttatgttgggttgtttcaaggatgctaccaacaacaacatctgttttaacctgctgtcttttcactcactgtcatatggcagcacagattttatagcttgctttctttgttttttttttttttgagatagagtctctctgtcccccaggctggagtgcaatggagccatctcagctcactgcaacttctgccttccaggttgaaagccattcttctgcctcagtctcccaagtagctgggattacaggcatgcaccatcacacctggctaattttgtagtttaagtagagacggggttttaccatgttggtcaggctaatctccaactcctgacctcaagtgatccaccaacctcggcctcccaaagttctgggattacaggtgtgagccaccgtgcctggcctatagctttcaataaaaggtgaatttgcctcttaaaatttgaacagaaagttttaatagtttacaaagtcggtgtcagccagtgaagactaggggcatgaccttcgtatgacttaatgtttttaaaagaaagataaagtttctttgtaaggtattattgtaataatcacatttctttgtaaagtattatattgttcctgagtatctagctactttgctttccagctaggcttctcttgggtattctcttaatcttttatttgtactgggttcttgtgtatatattatagtctgctgtgtgtaatttattataggaaaagggtaagacacatttactttgcggggatgacacaaaaaacctgtaaaaattagagaaacttccagtcatctcacattttctttggaaccgattattcttgtatcttagaactaaaatgacttatactgttttgtttttagaaagggtatccctcctgttgcccaggctggagtgcattggcacagtcatggctcactgcagcctccacctcccaggctcaagtgattctcccacctcagcctcctgagtagttggttactacaggtgcacaccaccatgcctggctaattttttgtattttttgtagagatggggtttcaccatgttgcccaggctggtctgaaactcctgagctcaagtgatctgcccgcctcggcctcccaaagtgctggggttacaggcatgagccaccacatcctatttaaagcttaaataggacttttactatttttaaagtagcatagaaaactgtttgtatcaggcatagtcataattgctctttgatgctgctcctatctgggctgcatgactacatttgtgtgccttgttctcctgtagtgaggacagaatgtgggtcactggaacagtaagtactcatagaactagctgctgctgctattacgactggttgcctgttttgcattttttccgtttaatcatcagactctaaggaagacattattttctctttgtatagatgaggaaacagaattccaaaaagttagctaacatttgcacagagtgtctggctgagcaactaagtggcagagtcagattttaactgacctctggcaagaggactagaggaatacagttgaagtgatacttgctttcatgaacatgaatgtgaaccataatacataatacccatgatgctattttgtggggagtttaaggtgtctcagtccagaaattagcagctgattattgcctgtagctgtaattttacttattcagtgttatttaataaattgccagcattacaatttcgatgaaggcagatttttggcttactgaaacaggataaaaatctggcaacaggggtcccactttgccctgtcatagtaatcgaagctgtgattggatgtggcacagggagtggagtggatgggtgtgcacttgctttccaggctgctgctccccgtctgtcccttattgcatttatcatcttcagcccagtcagtcttgctgttaggggaactgcccagtctctgtaagtgatggcatttgtgaccccattgtaggtaaaaatgttttcccctttttagacattgctggctgagcgcggtggctcatgcctataatcccagcactttgggaggccgaggtgggtggatcgcttaagtcctggagttcaagaccagcctgggcaacgtggggaaaccctgtagccaggcgtggtggcacgtgctacttggtaggggctgaggtgggagtatcacttgagcctgggaggcagaggttgcagtgagccgagattacaccactggcacaccactgtactccatcctgggtgacagagcaggaccctgtcgtaaaaaaaaaaaaaaaaaaaaaaagtaaaagacattgctgagtttcgcacctggacttacagctcagcaggtgggaatccttttgtatttgggccactcatcatcttgctggcgtgtgaggattcacatctccttatcaccttacctgttttcagtttttatttaattttattagttccccacttgacgtccttctctatttttaattcagctatgaattagtattgagaattagaatttttggtgaaaaatttggccgtagttgcagagtcactgtcctctttccttttcacagtgagaactgttgtcttcttcctggcaaccttttataggattctatggccagtgttaatcccataatttgagctcacttattttatatgactgtacatttaacagaagattctaagacaggtttgagggaaatatgttaaaggtgctgtgtactgaattgatcataatgaatgaaatacttttatttcctttccctttgtagctgagatgagtgaactgagtgtggcacagaaaccagaaaaacttttggagcgctgcaagtactggcctgcttgtaaaaatggggatgagtgtgcctaccatcaccccatctcaccctgcaagtgagtaccatccccccatctcaccctgcaagtgagtaccatccccccatctcaccctgcaagtaccatcccccatctcacctggcaagtaccatcccatctcacccagcaagtaccatcccccacatctcaaccctcaagtgagtaccatcccatctcaccctgcaagtaccatcccatttcaccctgcaagtaccatcccccatctcaccctgcaagtaccatctccccatctcaccctgtaactaccatcccatctcaccctgcaagtgagtaccatccctgcatttcaccctgcaagtaccatctcatctcaccctgcaagtaccaccccctcatctcaccctgcaagtatcatcccccatctagccctgtaagtgcgagtaccatcccccatcttaccctgcaagtaccatcacccacttcaccctgcaagtaccatcccccacctcagcctgcaagtaccatcccccacctcagcctgcaagtaccatcccctatctcaccctgcaagtaccatccccatctcaccctgcaagtatcatcccccacctcaccctgcaagtaccatcccccatctcaccctgcaattgagtaccatcccccatctcaccctgcaagtaccatcccccatctcaccctgcaagtgagtaccatcccccatctcaccttgcaagtaccatcccccatctcaccctgcaagtaccatcccccatctcaccctgcaagtatcatctcaccctgcaagtgagtaccatccccccatctcatcctgcaagtaccatcccccatctcaccctgcaagtaccatcccccatctcaccctgcaagtaccatcccccatcttaccctgcaagtgaataccatccccatctcaccctgcaagtgaataccatccccatctcaccctgcaagtgaataccatcccccatctcaccctgcaagtgaataccatccccatctcatcctgcaagtgaataccatccccatctcaccctgcaagtcatagccagctgattttggctttcagtttagtgtctgtatcttacaccttattttgtttttgtttttctgtggacaagtttttagttttataactaaatggagtgacaattaccatggccctctccagagtagcgtatttcttgttcatgtatgtttgttgagaggcaagggtgggggggctttgtttgtgcctcggacctgtgagatactgaaatacctggggttccttaagaattctgtacgtttaagcagatgggtatatggtaactgccccagtttgtatgcattttggccacacgcagtatacacagattttgaggagttgagggaaaagttagttatgggtaatgaaaacattttggacttgggttaaatttttccttacaagctggctggctcaatgtaatgagctttatgagatggctttttggggcttcttttttttgccgggggtaggtcctatggatggaatcttcatttttaattcttttaaggaaatgatgtgggaataatacagctgtacatataaggagagtatgggatgagtctttttgtatcacaaagccttgcatagaggatgtgtttattgtattaatgagttcactgcataaaatatataccttttttattaagtggtgtgatttttatcacaaaagcttgtctttcttggtggcttggcttgagttaaaagcctgtgtttgtgttatcccaagctttggaataaatgattgtgtcctattttgatatatggtcttattttaaaatattctttttgttgctgttttttttgcatttctcaaaacaagtagtgatggggagtgtaaagagcccttatacacagaactaataatgcattgagaagattgaatatgaaatatgctttttttttgttttgtagagccttccccaattgtaaatttgctgaaaaatgtttgtttgttcacccaaattgtaaatatgatgcaaagtgtactaaaccagattgtcccttcactcatgtgagtagaagaattccagtactgtctccaaaaccaggtgagtgagtgactgtgctactacatttgggtaaaaaatataaaatggcattttgtgactgtaaatggaattgaacaaacaaaagatggtttcagaaataattttggcaggatcagttaatccaaccagtctttaaagagcaagtgtgcctatctgtagtattccgaagtattttgactagtgaatatataaaccttaccattctaatttaaaaatggttttcactttcaaaaaaaacatcagtagactgcattaaaaatgggttttccaaacagattggagatcagtcctggtttttattttgttagcagttgcaccaccagcaccaccttccagtagtcagctctgccgttacttccctgcttgtaagaagatggaatgtcccttctatcatccaaaagtaagaacttctattttctcaaatcaatttagtgacaacatctcaatttcctcatttaacttcttttttgtcagagttactacattggtgcaaaagtaattgcgatttttgccagtaaaactattaagttgttcctcgtcactgaacctccatctggccccttaggccaagtggtctgaaactgttcaatgttagtatcccaagcactcagtggggggaagcatatctttgctagtcacattttccattattccctgcatttaagtatatggatgggttttagcgggggctggggggcagtttgaacctaatgtcagaactgagatgaagaaatccagtaggtactgcttaaaaccatccaaacttgtactgatgatggttgatgaatctccagatgtttagttggtcaaaatgaattatctccttcttgccccggtagcttgaggaccatatgaaggccttcacttgcccccatctgtaactgggcgtagatgagggtactcagtgaagagtgtaagggataattagaagtttttgtggtatgctaaactaccttttgaaattgtacttgctgtgattctttgactagaattttgtgtctcaaggttaagtccatttttcaaggcttcactagtattaaaatggtccttatagatggaatctcttactctgttaatggttagggtgggctggttattgtctcctaagttgtatgttggccaggtgaggtgggtcaggcctgctatcctagtactttgggaggtagaggcagaagtggaaggatcgtttgagcccgggagtttgaaaccagcctaggcaacatttaagagaccccatctcttaaaaaaaaaaaaaacaggcttggtagcacacgcctgtagtcccagctactcgggagactgaggcaagaggtcatgccacttcactccagcctgggtgacagagtgagaccctgtctcaaataataaaataatgtgtttacttatattagccttgtggatattgttgaagctctgttatctctattcagcattgtaggtttaacactcaatgtacaagaccggactgcacattctaccatcccaccattaatgtcccaccacgacatgccttgaaatggattcgacctcaaaccaggtaaacattcaaattcgtttttctcatgtcagttcaaattcttttttctaatttgcagtttctaaatttataagcacacaaaattggaaactagactgttactttgaatttttttctttgctgtttaattatagaaggctcctttggcaaaataatttactacatgggctaaattttacattatccagtggttacttttttaacctagattatcttgctctgttgcccaggttggagtgcagtcacactatcatagctcactgcagcctcaaacccctgggttcaatccatcctcccacctgtagctgagactacaagcgtgtgcctctatacctggctaattttttttattttaagtagagatggggtcttgaactcctgagctgaagcgatatccttccaccgtggccttccaaagtaccaggattacaggcatgagccaccacacccagccagattttaacttctcattatatactacgcaaacatatactaaggccagcaggagtatatatatgtgtactgtacttgaatttcacatccattttcttcgacattagcaactgggagatactgaaaggaagtttcaaaatattttagtgtggccagaaaatttaattacatatggtattatcttttatctacctgacataattgaattatttttaaaaatctgccatttatattgtaatcttatgaccaaatatttattgcttaaaactagtcaactttttaaactgagatatatggtatatatggatacaaagcagataattaaaacaatttttggttctgttcattcagcgaatagcacccagtcctgcctggcagaagatcatgcagtttggaagttttcatgtactgatgaaagatactctacagaacttgtcaaatctttgaaacttggaatatattgctttcataatatgaagttttattgcctatcta

SEQ ID NO: 15895 - DNA, 48875 bp, Homo sapiens
gtgcgcggccgggggcggaacggaggaggaggcggtggtgtcccggctgcggggtaggagtccgcggcagcctccgggtaagccaagcgccgcgcagtgctgagttcccgcacgccgcagagccatggagatcggcaccgagatcagccgcaagatccgggtgaggcccgtgccggtcgggggtgggaagccaggtctcggcgagcgggcggttgtcaggagtaacggggactgtgggcccgggtggacgccgcggcctggcctccgctggacgctcctggcgggctgcggctcctcctcgtccaggccgcctcggccctggggacatttgcggcctcggagcgtggctgcggctgaagtagccgccgggaaatggaaggacaggcgcaggcccggctggagccaccaccgcggcgcacggcgccgctttggatccgctgcgggaggtgggcgccgcggggctggggctggagctggagtggggtgcggggtggggggcggtgcaggcgaggctcctcccagcccccgcccgggggatccgaggtgcgcgcaccagcaaagtggcctcagccgctgcagagtccggtcttgttttcctagagccgcctttctcacatgcacgtttgctctttttctctcagagtgccattaaggggaaattacaagaattaggagcttatgttggtaagtgtttttttggttgttagtcttacagaatttagagtttgcagctaatagaattttagtgaatgcgtatttctcaccgtactttggacattgggagagactcccttctaccttcttcaaatcttatactccctggttacttctttatcatctttttgcaaccttgttttttttctcccaaacctccttctgttatggtgttttgaaatttagtttcctccgttaaggctctgtttgaccgaattttattttatgtttttcctattctctctctctctcattttaaattctagggacgggtctcgctacgttgcccaggctggtcttaactcctgggctcaagcaattatctgaccttagcctccctaggtgctgggagtgcggggattactggtgtgagccaccatgcctgtttaaagtttcctattcttgttactttcctcttgacatttgtttttagaactctgatgttggatgtgaatgtttgatgctttctggcatttgcttctgtaatggttcagtgagttttattttccgatctctttatgttttccctctctctctgaaacagtaaggctttttccgtctctttattcttttataatttgagtgtttactctgggtcaggtactgtgcttaactattgtatatgtattaactcaggataatccctacgagaatcctggaaggtaagtggcagtatctttgactgtgtaaacaaggaaactgaggctttgcctacttgagcaaggttttatggtttgcccccaaagctggtgcctcctataaaaataatagctaccactaatgacagtggttctcaaagtgtgggagactccaagggcctctgaagtcaaaactgttttcatattaatactaagatggtatttgttatttttcactgtggtggtggtgtttggattgtgtaaaactaatggttgataaaacttgtcagcatagtaacaccataatgaaatcatattcaaatcactccccccttgtagtttttttctttttgagccaattacacttaaaatgtcattgatgaagatgtgaagtccagggtttacaaaatattttttatcttcttagtattcagtgcgaggaaatagaaatgctcataaaacatttttattgtatactgaaatacgattgttctgaggaaaatcattttagttgagaactaagctagccacctctttcagggaacatcatttttaacttcaaagtactgacaaactggttacatacactaggatatttggcagatatttacttgaaagtgagcaaagaaaagaatccatagtctttgttgccaatcacatgtgagctttcaaatgaaaattagaattttggaaaatctgagcctgcctccatgaatttcacagcttcccagtacttaaaaaatttctgattaaataaatggtgatttaaaaaaaatttgttattattattattttttttgagatggaatttcactcgttgcccaggctggagtgcagtggcgtgatcttggctcactgcaagctctgcctcccgggttcaagcgattcttttgcctcagcctcccgagtagctgggattacaggcatctgccactacacccagctaattttttgtatttttagtagagacagggtttcaccatgttggccaggctggtctcaaactcctgaccttgtgattcgcgtgcctcagcctcccaaagtgctgggattacaggtgtcagccactgcatccggccaactcaatggcgatattaaaaaataattattttatactgcataatgaaatatatcaacgtgtcagtggtttttgtagctaagtgaaccaatcttttctaaataaccaatgcataatattacaaaattatgcagtggattaaagatttatttaaactctggggtgggtcagtggatttttgtgcaacagttcaaaaaggtcattgacgtatttgacattccacgttgctttaacatttaataagctaccacttgtttagttttggtgtagtgtcacagaagaatatccaccttatctgaaaagactatcagaatactcctttttcaactgcatatctgtgagaccagattttttcatattcttcagtcataagcacatagaacaagatatataaaaatatgaaacaaggccagtctttgcagtaaatttttctttttcttttttttgagatggggtctcactctgtggttcgggctggagtgcagtggtgcaatcttggctcactgcaacctccgcctcccaggttcaagcaattctcctgcctcagcttcccgagtagctgggattacaggcacctgccaccaccccgccccccccccccggctaatttttgtgtttttagtggagacggtgtttcaccatgttggccaggctgatctcgaactcctgaccttaggtgatccacttgtctcagcctcccagagtgctgggattacaggtgtgagccactgtgccttgcctaaatttttttttggaaaatttaataatgttacttgtgttaatataattggatttgtgattaacatgtgatggatttattttttaatgaattaataaatactttttaattaaaaatgatcagttctaattttgaacaccataaataatagaacctgcataaaccaaagaaggggcccaagaccaaacagtttgagaattggtaatttatggagtacttaccaccatttgctgggcactttcataaacgatttgttgtcaggattgttggaagactaacagatgagagaattgaggctcagagaaaataaagctgaaccaagatttatttattcttttattctttcaacacttgaactgcattttttatagttttctttgaaacaaaaaaagtacttctgaaatgaacctttctgcctgcatagaaatattacaagtatttaaggtattaaagaaatttgtcacagcatggtggttcacgcctgtaatcacagcactttgggaggccgaggtgggtggatcacttgaggtcaggagttcgagaccagcctagtcaacatgctgaaacctggtgtctactaaaaatacaaacattagctgggtgtggtggcaggtgcctgtaatcccagctactcgggaggctgaggcaggagaatcgcttgaacccaggaagcagagcttgcagtgagccgagattgtgccactacactccaacctgggagacagagcaagactctgtcgtaaaagaaaaaaaaaaaaaagagaactggaatggagttttgagggtcagagattagagttcctgataacagcttttgcttccttatcttcttagtgaggtttttgtttttttgttcttttaaatcctagacctcactctcataatcactgtaggattaccactaggagggtgttttttggcttcttttatttattttatttatttatttttttttgagacagagtcttgctctgttgcccaggctggagtgcagtggcaggatctgagcgcactgcaagctccgcctcctgggttcacaccattctcctgcctcggcctcccgagtagctgagactataggcgctcaccaccacacccggctaattttttgtatttttagtagagacagggtttcactgtgttagccaggatggtctcaatctcctaaccttgtgatctgcccaccttggcctcccaaagtgctgggattacaggcatgagccaccgcgcctggccttttttcttttttttttttttttatcctagacctcacccttataatcattgtaggattaccactgtgagggtaaaaccgtgcattgagttgacattatttaatgttaaaattgatttttttaaatgatgtggagcttttgggtctatttgtttattcgatgttgctacaagtttgttactgtgagtaattgaaacctgcctttagcaagggtaaagatgttcacttgagaaatgagtgttattttgaaactttgcaaattaaaactaaacaaaactcaattctttttcttggggaatgttcaaatatttcccataagcttctttgaaattaataagcattattaaaaagattcaaggaagtgaatgcatgctcaagtttgaccctataattcagaatgtttagttttgtaagtatcaattattcttaatttccattcttctagtatttgaaatacctgtggaatgaagagaaaaaaattaaagctaagccatcttgtccaatgtaattccagtagagctctgcgactctaaagcttagagctacatctatattttcaagcacatcaactttaagaagaaagttttgaggaaacaaagttttgatctacctttccttttaaatagatgaagaacttcctgattacattatggtgatggtggccaacaagaaaagtcaggaccaaatgacagaggatctgtccctgtttctagggaacaacacaattcgattcaccgtatggtatgtttctgaatttttgtgcctcagaccaaagtttggcacaagcctgagttgatattctgtccaaagagaggttcttgacacttgagttaggtttactttggagaggcagtttgtgagtgatgagagcacagcctctgtattagtccattttcacagtgctatgaagaaatacccgagactgggtaatttctaaaagaaagaggtttaattgactcagagttccacatggctggggaggccccaggaaggggaagcaagcaccttcttcacaagtcgacaggaaagagaagagtgaaggaggaacttccagagacttatataaaatcatcagatcttgtgagaactcactgtctcttgagaactcgggaactcactgtctcttgagaactcactatcatgagaacatcatgggggaaaccacccccatgacccagtcacctccctcccttgacaggtggggattacaattcaatataagatttgggtggggacacagagccaaaccttatcagcctctgaagccagacagccaaagttgaatcctggctgtgtcttgccttggtttctctagctataaaatggaaatagtacagccacttgctttataaaattattattgaggatcaaatgggctaatatgtgtaaagtacttataggtgtccctagcattttcctaaggaattcttagtatatgtcggctatacttaatatgtttcttttgtaaacttctatatctttttttttgagacagggtcttgctctgtcaccaggctggagcacagtggtacaatcatggctcgctgcagcctcgatctcctggtttcaagtgatcatcccattgcagtcccctccttcctgaactcccatgcctgactaatttttaaattttttgttcagacagggtcttagtatgttgccctggatgctcttgaactcctgggctcaagcagtcctcctgccttggccttcagaagtcttggggttataggtatgagccactgcacctggccagcttctgtatcttatagttccttttcccccaccaaaaccagttacagatgtttttttgaactgggttggcttcttacattgccttttacaatgagttacctttagagggcaaggttttctgtttctcacttttctgtttcttactttttaagctttttgttaaactcacaccttcattttgagtaataattgtagtgtaatgttacagcatattttgagattataagtttttttaagtttggaattttaaaataggcaactttgcttttatacataaattactgttatatgcctttagttgagaatactgactagaagagtaagattcaacttaagatgctaggtcctggtaccaggtttgaggtaaagtgaggatgagggctggaggataatgatgtagctgagaatagacagacgaaatactttattaggcttctcaggctaggaactaccagttaccgtgaaaggtgatgatgtagcagaagtgagcaagtggcctgccgaatttgagtgcaagaggaggcactgagtggggagatgagcctggttaagttcttgcctttataccaaaggtcgtcttcaaggtgtttttgcccaagtaggcaactgtatgcttatcaaccgtcttgaaattctgcacagaattctctgggtttatacattgcacaaatttgaagaacattgtatagtggtcatcagttgttatgatacactgctgcctcactgtgggtgacccaacccatttgttacaatttgtccccagaggttattccctcccagccccccacaaaaaaagactgtgggtcttttgactgggaaaattaccattattgtgagtactatttttttttctaaagcgaccgagtagatccttttctccgataacttgatagaatacttagatttttaaaacagactaccaaatgaatttaaaaccaaattaattcaacattctcatctggccataaattgagttctttaacatgtagtgaagcaaagggtgatgtccccattttggcactttgctttcttaagttagtgttcattaacaccagccccaaacagactattgtgattatttggagccttgaagtaattgtgtccgtggggacagtagcatgtgactagggttctcattgaaacatgaggtttctggcatattttgagaggtactgggaagggatgtaaggcaaagtacctcatttataactaccaaaacaggttatgttacaagcaagattacagccttacagcatcagttttgaaagtaatagagtgaaatgatatagcatagtttgagattataacttgttttaacctctcagaattaagttgtccaagacaccatctagtttaagcagttaatataagctgcttaaatggtggtaataataagcaatattacatgtttatgatacttgttttactgtaagctacagtaaatctttagtacttacaaacagggtgacatattttgtagactaagactggtcagatgatattctttcccatatttttgcagaggctagatgttgaaaacagtgaagaaaaaaatacaattttttattgacttctgtaggatttatacaaagcccttttttaaaaatgtgaagtttgaaagttcataccatttattcactaaatacagtttatcagtatttatctcagctaggtgcggtggctcacgcccgtaatctcaacactttgggaggctgaggcaggtggttctctcaagtccaggacttcaagaccagcctggacaacacagtgaaaccccatctctatttaaaaataataaaaatataaaaaaatttaaaaaattatctctgaatataatgtcataaatttagagtgacagttgaaatgaaatctttcttaacagaaggtttatttttgttttttgtttttttcctcaggcttcatggtgtattagataaacttcgctctgttacaactggtaagattcataacttttttttttaatttctgcttgctatggcatatgatttgtttctttctaaagtcatagtgctttgggaaaaacccatcaatttcaaaacggttcatttgaacttttttagaaagcacatacttttatgaacttaagagcagtaaatttaacataattcaaagataatttaagtgtgggagagggagcagtgcactttatccgaaggaaataattacatatatgtgcaaagatttagcctcaaggatatttcagtattttataattgaaaacaatttaaaagttcagtcataataaacgaaattgttgtattaccatgtgtggaataatatttaactattaaaaataatgttgtggaagaataacagaatatacacgcataagatacatgttttaaaaaatgtgtatatatgctcttcccccgaaaaatcacctttgagataattggtgatttttattatatttttaaaattttctacaataaacatactgcttttgaattggtgatgaggaaggaaacgacttaaagtaataaaaatagatggccgggcacggtggctcacgcctgtaatcccagcattttgggaggccaaggtgggcggatcatgggctcaggagatggagaccatcttggccaaccaacatggtgaatctccgtctctactaaaaatacaaaaattagccaggcatcgtggcacatgcctgtaatcccagctacttgggaggccggggcaggagaatcgcttgaaccagggatttggaggttgcagggagccgagaacgcgccactgccctccagcctggcgacagagcgagactccatctcaaaaataaataaataaataaaaataagaaataaaaatagattaaaaggactgtatttttcttttcagaaccctctagtctgaagtcttctgataccaacatctttgatagtaacgtgccttcaaacaagagcaatttcagtcggggagatgagaggaggcatgaagctgcagtgccaccacttgccattcctagcgcgagacctgaaaaaagagattccagagtttctacaagttcgcaggagtcaaaaaccacaaatgtcaggtaagagtctggtgtagacctgctgggggcagatggctctgtgtatgtgacatttatattagtttttatatctttcagtttgctgttctcagcaatttttagaaacaatgaagtgatcgtgagtagttttttgaataaaataatggataagatctaagtatgattatcttttatcacaaatttagtaaatcaaagttgaaagaaagtgcaatttcaaagcagttttgaatggaatatgtaaagggagtatcctcagttttttcattgaaatttttcaagtaaacattctttaaagatttggtgataattgccctaatttggctgtaatacattttgttgttcttttaaatagacagacttacgatgatggagctgcaacccgactaatgtcaacagtgaaacctttgagggagccagcaccctctgaagatgtgattgatattaagccagaaccagatgatctcattgacgaagacctcaactttgtgcaggagaatcccttatctcagaaaaaacctacagtgacacttacatatggttcttctcgcccttctattgaaatttatcgaccacctgcaagtagaaatgcagatagtggtgttcatttaaacaggttgcaatttcaacagcagcagaatagtattcatgctgccaagcagcttgatatgcagagtagttgggtatatgaaacaggacgtttgtgtgaaccagaggtgcttaacagcttagaagaaacgtatagtccgttctttagaaacaactcggagaaaatgagtatggaggtttgtatgtacttttaaattctggcttaggctaaaaatcggcagttcttgataccaaataatatatgaagtaactaaacacatattccaaggctgggcacagtggctcacacctgtaatcccaggactttgggaggccgaggcgggtggatcacgaggtcaggagattgagaccatcctggctaacacggtgaaaccccgtctctactaaaaatacaaaaaattagccaggcatggtggcaggcgcctgtagtcccagctactcgggaggctgaggcaggagaatggcgtgaacctgggaggcggagcttgcactgagccaagatcgtgccactgcactccagcctgggcaacagagcgagactccgtctcaaccaaaaaagaaaaaacaaaaaacaaaaaaaacacatattccaaatttattttattttattttactttttgagaaggagtttcactcttgttgcccaggctggagtgtgatggcgcgatctcaactcactgcaacctccacctcctgggttcaagcgattctcctgcttcagcctcccgagtagctggtattacccgccaccatgcctggctaattttttgtatttttagcaaagacagggtttcaccgtgttggccaggctggtcttgaaatcctggccctgtgatccacccaccttgatcttggctcactgcaacctgtgcttcccaggttcaagtgattcttctgattcagcctcctgaatagctgggattacaggtgtgtactaccacgaccagctaatttttgtatttttagtagagatggtgtttcaccatgttggaccaggctggtcttgaactcctgacctcaggtgatctgccctccttggcctcccaaagtgttgggattacaggcatgtaccatggcgcctggccccaagtttatttttaaattgttttatctgctgtttctcatgctataccagattttcttccccatggcttgctcctagagttcttttgtatcacatctgtatacctttttgggatttccagcatttgagatattaatcttaaattaatttggggggtttcaatcaattttagattgttcatggtaattgctagtgagcaaccaattaactctgttttattagtttcctcaatagcactatatgcagctgttgataaaataaatgtaaagttctaatttttgttttagctaaaggttgactgttagggataatatttatatttatagtatttatttatttatttattttgatacggtgtctcactctgtcgcccaggctggagtgcagtggcatgatcttggctccctacatcctccacctcccgggttcaagtgagtcttctgcctcagcctcccgagtagctcggactacaggcacatgccgccacgctcagctaatttttgtatttttatagagacagggtttcaccatattggccaggctggtctcgaaatcctgaccttgtgatccgcccacttcggccttccaaagtgctaggattacagatgtgagccaccacacccagcctcatatttatatttttacataaaaccaagaaatactctgtgaatttctcatattactgtgtactgtttttttcttaaaatggaaacattttgtggtagaactcttgttattttctgagattaggtaagcataaattttatctgattgcaggatgaaaactttcggaagagaaagttgcctgtggtaagttcagttgttaaagtaaaaaaattcaatcatgatggagaagaggaggaagaagatgatgattacgggtctcgaacaggaagcatctccagcagtgtgtctgtgcctgcaaagcctgaaaggaggtaccttgaacatggctgtaaattaatctttaactgccttggtggagtcttcctgatttattgaagagaataatcacgaaaataatttttgtttgttttttgagacggagtctcgctctgtcaaccaggctggagtgcagtgccacgatctcggctcactgcaacctctgcctcccaggttcaagtgattctcctgattgagcctcctgaatagctgggattataggtgtgcactaccatgaccagctaatttttgtatttttagtagagatggtgtttcaccatgttggaccaggctggtctcgaactcctgacctcaggtgatctgccctcctcagcttcccaaagtgttgggattacaggcatgagccaccgcacctgacataaatatttaatgtaataccgtgtaagacttttccattgggttttgagaaacacgttaatgagagaaattgcttaacattggagaggattgcagagaatattgactaatatggtggggtgaggaggaacaacatcaattaagattcagatttattatttaaaaaaactaaaaggggcctaggcatggtggctcatgcctgtacctagcactttgggaggctgaggcaggaggattgcttgagaccaggagttcgagaccagcctgggcgatgtaatgagtctttgtctcttaaaaaaaattaaaataaattagttggtcattgtggcaggcacctgtagtcctggactggagaggtggatgtggaagcattgcttgagcctagaagtttaaggctgcagtgacatcacactccatcctgggtgagagagtaagagtctgtctaaaaaaaaaaataaggttccagtgtagttggcattttctaaaaactgcagctagtctgtttaaaacctagagaaggttgtggtaaaggcataatagatggctggcctgtgaggaactgaaatttaaagtttaataaaaatacctttcttaactcttttagaccttctcttccaccttctaaacaagctaacaagaatctgattttgaaggctatatctgaagctcaagaatccgtaacaaaaacaactaactactctacaggtaatttaaatgtattatgtttacacttggtaagacatttctgtaattcttgagtaaggtgaaaatgattgctccttaaattgtaaaataaaggtgcctgtcagatgtcaagaccaagatgaggttcccatatagaaaaatggctttaaaaggaaattgacaagtttgagaaacttcgccaactgttattggactgtagtttttcaagcaccatataatgccttttatatctttccaatgtgtgtaaaatatatagtacgtaaatattttgaagagaattttgatgaagtaggactttcatattagtagcattagattcaacattagatatgaatttacgatgtgtaaaggggagtacaattggacaatgataggtatctgaagttatagaaatttgttaaacagtagtatataaacaaggttggtttcttcccttttggcggaactcattagtagaatataaggcagagaattgactcatttgtgatgttcctgctccaattctagtggaagtactgaataattttatgagagaatataaaagtattacgttttcaaaacaggagatgaatcagctgtaagctggtcttacggaaagctgattctgaaatgcaaacaactgatgggtgtcattttgtgttgtcaaattctgtactctctggccgacctgttgtagccaatgtgtaaacttgtgttaagaagctgatggtaatgagctactctaaaaagatttaagttttgctgtggatttggtgggtgtacttacagcattgccctgcttatccactctctcgcttttttttgtgaccccccttcctaaaatgaggtaaactgtagccatcagtttttttatttgttttctttttttgaggcgaagtcttgctctgttgcccaggctggagtgcagtggtgtgatcttggcttactgcaatctctgcctcctgggtccaagcgattctcctgcctcagcctcccaagtagctgggattacaggcgcccactaccatgccaggctaatttttttgtatttttagtagaggcggggttccaccatgttggccaggctggtctcgtactcctgacctcaggtgatcacctgcctcctcggcctcccaaaatgctgggattacaagcgtgagccaccgcgcctggcaccatcagtttttgatcctgatacttgtctgtcctcttggttctcctcatccctaatttaaccttgaacacaaaattcaacaggttttggcatatagaataaagattatcaggcaaaggcgcactcttgacctaatgatatatctacatttcatttcctgatctatcagcaatattaattgtctagaatgatgagaagtttagagaagttccatgactttgaaattttctttctttacctaggttatctaaattacaatttgaaactcatataagatcatgaagctaagcttaaataaaccgcattttgttgaaaatgaatacatatgtactatattgtattcatggtatgtggttgtatggatattgtttacatatgtttggataaataggttcaggtatctatctcagtaacgtaagaaaaaatgaatggtatctatggattgaactcctcatatatatgttcttttcttttctttttcttttttttttggagacagagtctcactctgttgcccaggctggagtgcacagtggtgcaatctcggctcactgcaacctccgccttccgggtttaagcaattctcctgcctcagcctcctgagtagttgggattacaggtgtgtgccactatgcccggctagtgtttgtatttttagtagaaacgaggttttaccatgttggccaggctggtctcaaactcctgacctcaagtgatccacccaccttgcctcccaaagtgctgagattacaggcatgagccactgcgcccagcctgaactcatatgtcctaaaccaaaggaggcatttatatttaatatgacatagtcactgtggagttttgacgtattactgcatttgtatttctatcttttttgcttttatgtgaaagttccacagaaacagacacttccagttgctcccagaactcgaacttctcaagaagaattgctagcagaagtggtccagggacaaagtaggacccccagaataagtccccccattaaagaagaggaaacaaaaggagattctgtagaaaaaaatcaaggtaataacttaaatgatgtttcactctttactacagttttttcatgaggcattgaatattttccaatggatttttatgaaatattacactatgaaaaaagtgatgattaagcccagaaatagaatgagaagaataccatgaggaaggttcataccaacacttcagaaaaaaattttttttttaaagaggtagggtcttgctgtgttgcccaggcagtcctcaaactcctgggctcaagcagtcctcctgcctcagcatccttagtagctggaggtgtgtacaagtgtgtgccactgcacccagccctttctagaaatttttgaaagtctttttattgtggaaatttttaatattctcaaaaatggaaaggctagtacagtgaactctcatgaacccagtcattaagccttagttattatcagaattttgctggtctttagatagctccttcttaaagatatatttatttctgcattctttctttttctctttttgttgatcctgcccgtttacctgaacttgaaattttagttacctttaaatctcccgtctcttaagcatcctgtctctgacctcccatatgtgtcccagcaaccctaatttatcccctcgtgcctaacatacttcagtttgcttccaggttttttttttttttttttttttttgcttttttctcagctttctcccccaattcctatacaatcttttgactttgaaagtgtgtctctcatcttctgactcctttgtgaaagtatctctcccctcctcctcattacccagaactaacgctattagtttggacttttggtgtctgttatctgacccctgggcctgcacagcccttctccatgactcttcagaccttttgtctcttttgtcgtcaagaaggattcttttttcttctgtttctttttctactaagatttgaattttaagaccccaccaaaaaaatctatatgcttattatgttatttctcacatacttttcaagaaccttggaatatattttttcatttcttcaaaactgtcctttaaattgttccaggtttcatgaaaccttatgatttcagaattgtcaattctgtatttgtttcctcattgtgtctctttaaaaatttttgactgtattgttcagtttgccatgacagcgttatatactattctgataattgataggcctgaggacaagacctgtttggtccccaaacagcagataggtaccaattggaaaatgtgaatgggccaaattgagaagaggagctgaaactgaggagggattttgctcagtgcagtggcagatgaggctgatctaaaaggactgcagtggtctactccctgtggagtctgtagtgtgttgcaccaaggttttcttcaaacacaggactctacgtgagagtcttggagtggaatcagatggagcagggaaacagacaatagagaaaaggaaagaatgtcagataaaaataggagaggaaaacaataggaaatctcaaagcaaggtgccatattttttaacatcacaaaatcaacagaagaaggttgttgattctgaagttagaatagctatccaaagcaaactttcccctaaaatgaacaacagaaaagtatcaaggtcaagtcctgtgccgaattaaaagataaaagggaataaaagacaaaacagcattgtttcaatgaaagcatgctgaaaggtataccaaaaagaaatacaatttcaaagtgagctagaagacattatttaaataatacaagacaaagccaagaaaaacataaaacagaagaactttgaggctgggtgcagtggctcatgcctgtaatcccaacactttgggaggctgaggcaggaggatcacttgagactagcctgggcagcatagcaaaaccctgtctcgacaaaaaataaaaatattagctgggcaaggtatacacctgtagtcctgtctccttgggaggctgaagtgggaggattgctggagcccgggaggctgaggtgggaggattgctggagcccaggaggctgaggttgcagtgagccacgatcataccattgccctccagggaggctgaggtgggaggattgctggagcccaggaggctgaggttgcagtgagccatgatcatgccattgccatctagtttgggcgatagagtgagactgtgtctcaaaataaatgaagactaaattagaaagaactcgaaagaattagtgcgtcttaataaaataaaacatgcgtgtaatcccagcaatttgggaggccaaggcgggaggatcacttgaggccaggagttgaagatcagccagggcaacatagcaaaaccttatggctacagaaaacagcaatttaaaaataaataaaattaaaacatcttcagagaaattgaagataaaagacaagaacattttaaaagtctaaaagggctcatgagaaagtggcaaatattgataataggcaatagaaatacagtgtttttatagtaggaatctccaaagaaacaatattcagaggaacagagcaaacattaactgtctttcaagaaaactttcatgaagtgaaaacatgtttgaaactgttgtctgaaaaattgtacagtatacctgagaatatttacccagaaccataacactaagatgtattatataattaatgaaattttaaaaagaaaaaaaatgatttggacattcaggcaaaaggggcacatgacttagaagaaaaggaaaggtagattatcatcaaacttttcaacagcatcacttttgtgctggaagaaaatggactagcatatttaagatactccagaaaagaaaatgtgagccaagaatttaatgtccagcaaaagtgacctttagaagtgatccagcaccaactgttatctatatgcagaaattcagagactcattcccatgaacttttcttaggaaatctaatggaggatgagcttcagacaagtaaaagcctgttgtcctgaatttacattggaaatgtttcggaactcacagtgtattttatatataaatacatttttttctagttctgtctactagaaggcatagaaacattcatcaacccttagcatcatctgtagttcccagattgtggtcttggaatacttcctatttaaaaaactaggcttcttgggctgggtgcagttgctcacgcctgtaatcccagcactttgggaagccgaggtgggcagatcacctgaggtcaggagttcaaaagcagcctggccagtgtggtgaaaccccatctctactaaaaatacaaaaaaattagctgggtgttgtggtgtgcgcctgtagtcctagctactcgggaggctgagccaggagaatcgcttggatccgggaggcggaggttgcagtgagccaagattgtgccaccgtactccagcctgggcaacagagtgagattccgtctcaagaaaaaataaaaataaaaaaacaaagaactaggcttcttgagaaatgtctttttccaggtctggggcaggaaatgttaacatgatcctggaatggctcaacatcccagatagcaaagaagctgtcaatgaatggtagaccacgtccaaaggatgcaggcgccaacttagaggtttccattggccaaaaatggaattatttgagattcagtaggtgtaaatatcgcggtgaattaaagcccatttaaatccacaatttcataatgacattttaaaaaaataagctctaactagtcaccttctggaaggtagtagataatcattcattgtcttgaaaactgggtaaataaaataattgaacatttatgctgtcttttctgtgagaacgataccactgggtaaccccataggacaggagttggcatctgttggaaccaaaccgtgcctattcatgtatgtattgtccgtggctactttcatactacagccttagttgaatagttgcaacagaccatatagcttgcatagcctaaaatagcctaaaagatttgccaacctctgatatagtagatgagagaaacattttcttttaaaatgatttcagctgataagagaacaagatggtaggattagagttatgcttttaagagtgaaaaccagttgttttgtgcctcttgatacaaaagaacagaacttttgtcttgccaaaaatgtaaacctaagtcatcaagctcccagtccagcagtcagtttgcaagaagttgcagaggccagaggagtatgttggttgagcttcaccatgagtgtgcagccggaaaaatagtgtttgggacactgtgggttgaatagcctgagaaattgagattaaaaggcaaatcaaaggaaaataaaaggagcaggattaaattgtagtggctagggatacccagtgtgtgtgaaattataaagaacctctaggcgttaatataaaaagcacatagtggttgcttttgaagaggaccgataaagatggagcacacagagaggcttctggggtggcagatgacgttctctcttttgacttggatggtagtcagaagggtgttttgccttacaaaaattcattaagctatatgtttgtgtggttttctatactgtgttttaaaaggggataattgaaatggtgtcaggtacctttgctgatgaggagtttggtattactagatatattcacaagtgtgaagtgatactgcaagcaactgttatctgttaatgtggttactcactgttgtacggtataatctggggcaggtttttaaaatataaacatgcactcgtattggcataagttgttaattttttttcttcttttgtttgagcagatagcattctctcatttctctggtgtctttatttttactagcgcacccacctcataatatgtgtactttttgctttttgtcttgccatcagtctgtcactagaagtttattttgccgatcttttcaaagacttaacaacattattctggctttattgatttttttttttttttggtgtttttgttttctatttcattgacttgtgctttttttttattttttttttttaagaggcgaggtctcactgtcacctaggctagagtacagtggcacaattgtagctcactgcaacctcaaatgcctgggctcaaatgatcctcccacctcagggaccataggcacacgccaccacgcccagctaatgtttaagtttttttgtaaagatggagtctcactatgttgcccaggctggtctggaactcctgagctcaagcagccctcttgcctcagcctcccaaagtgctaggtttacaggtgtgagccactgcacctggcccgacttctcttttaatttatccttccatattttaaaaattatttacctcaggctgtcttcttctcaaatgtaagcatttgagaagaatacatatgacaggttttaattcatcatgttttcattatcagagtgtctttaatttccattataattttcatcattgaaagtgtgttttctatacagtatttggaagtggtatgtgtttttgtcttttaatcctttttattatagacacctgacttaattgcattgtggttagataatgtaatttttacaatgcatagtttttgaaaattgttaacacttgcttagtgcataatcaagtttatgcatcttccacatgcattttggaagaaagtggactaattattggatggggaattttacatttattcagtagataaagctctactgttaacattattcaaatcttgaccttgctgagtttttgtgctgcttgacttaccacttgagaaagggtgttgaaattgcccaacatgatgacagatttatcttaatttctcttgtacttatatcaagtttttgctttatttttaggctgttatatactattaggtgcatacatatttaaatttgttatatcttctctgcaaattgaatcccttatcttgatttatgaccctctgcaaaaaagatgtttttatctcaaagtcagttttgcctgatattaatatagccatttaattatatttgctttatatatctggtttccctgcctttgttttcagttttctctctcatgctttaggtatatacagttgacccttgaaccagacaagtttgaactgtgtgggtccactcatacacttatatgtggatttttgaaaataaatatattggaaatattttttgagatgtggcaatttgaaaaaacttgtagataaactatatagcctagaaatagtgacaaaattaagaaaaatttaggtatgtcatgaacacataaaatatatgtagctactagactaacatttactatcttaaaacatacacatctattatgaagtttaatttatcaaaatatatgcacacaaacacagactttacatgataccgcttgtagttgagagaaatgtaagcaaacataaagatgcagtaatagctacataagatttactatagtacatactgtactactgtaataattttgtagttacctcctgttgctttatggtaagctaaggtgttttgagtgtccacttaaaatgctgtgtgatgcaaccatctctgcgacagttcagctctccagtaaattgtgaattgcagtgaaaggtgatctcgcagttcttgcatatttttcatcatgtttagtgcaatactgtaaaccttgaataacaccaggggacccataatgtgctactggtgatgctggacatgctcccaagaagtagagaaaagtcatgacattacaagaaaccattgctcagtatgtaccaaagatacatgttacaactgtggctgcagttattcaccatttctggataaatgaatttaacataagaaccatggttaaaaaaaaaagaaaaagaaaaaaatgtatgaagctgccactgcagctacgttggcaacagtaagtagttaaatgtttgggaagtcaaaagttgtatgtgggttttcaactgttgttgggggattggttcccttagccctcatattgtttaagggtcaactatatattatatcttaaatattataaagctggattttgttttttaatctcatctgagtttgccttttattggagagtttagaccagtcacatttattacaattactggtatagttggattactttctgtcatcattgctgatttgcatttgcctgcttttctgttttttctcatgttttttaaggttcattaattactgttattgttgacaaccctaaccctggttctacaattttaaactagtttactgtttaaaccttccctttctgttctttttttttttttttgagacggagtctcactttgttgccaggctggagtgtagtagcgcgatctcggctcaccgcaacctccgactccttggttcaagtgattctcctgcctcagcctcccaagtagctgggattatagacgcccaccactacgcccagctaatttttgtatttttaatagagacgaggtttcaccatattggccaggatggtctcaatctcttgatctctgatcccctgaccttgttatctgcccgcttcagcctcccaaagtgttgggattataggtgtgagccaccatgcttggcctcatttctgttcttttagtcgttaccagtgaaattttaccacacaaatttaatttagtattctaaaagttaatatcctgaccccactctcaaacagtaaaaggacttttgaatacctatgaagagcttcagtctttatcctcctcatttacttgtttccagtgtttcaatttgatcttttttaaaatgcacaagttgggccgggtgcggtggctcatgcctgtaatcccagcactttgggaggctgaggcgggtggatcacctgaggtcaggagttcgagaccagcctgaccatatggtgaaaccctgtctctactaaaaatagaaaaattagccaggcatggtggcacacacctgtagtcccagctactcaggaggctgaggcagaagaatcgcttgaacccaggaggcagaggttgcagtgggctgagattgcgccgctgcactccagcctgagcgacaaagcgacactccttatcaaaaaaaataagtaaaataaaatacacaagttggacaacatttttgtaattttttccaggcaatgttttttgaggtttacctcctgtttatcattttacttattcttaacatctctgagtgttatttggggatcattattttccaatattttgaagtatttttgaagtatttttttggaagtttcactgaaacatgtctgttggcaatatattttccaagagtctattcacctgtgagtgttttctttctttgtgttcttgtgcagtagttttgctggatacccaaatctaggttgttagttatttgctctccacaccttatatatattattatcccactgtcttctgctttccattgttgagtggacttctatcattctaattgtctgtcgttcctttgtaggtgatctgtcctttctctctggctgctttcaagatcttctctttgtgtttgatgttctgcagtttcactacgatgtgtctaggcgtggatttccttttatttttcctgtttggtataatgtatggaagcatcccatatatttgaaataaaatgcattatgaaatacatgctcaccatagaaaatctggaaaaagaaagcatatcaatgtaatatctcctgatagatgagaaaataatcaaatagtataaaaaagattaaaaataaaaagcaacattccttacttcattcttctctatactagtcccactccgcagaatcccccacttttaaatgcttctgtttctttctccgtgttgtaataatatgctttatactgtttcttcattgaccaactagatagtacctgttgatttcttgctgtatgtcaggttctagcccatttatacttttcccttgcttccaagctcatacagcaaaatcaatttttaattcatttattggttactttagtaattttaagtagtaacttaaatatttcttgtctggttatatttcagtatattttgacttctgaaagatatgtatccttcaattcctttttttttttggaggtagagtctcacttttgtcacccaggctggagtgcagtggcgtaatcctggctcactgcaacctctgcctcctgggtttaagtgattctcctgcctcagcctccttagtagcttgggactacaggcacaccctgccacacctggaatttttaataaaatttttagtagagacagggtctcaccatcatgcccaggctggtctcaaactcctgagctcaggcagtctgcccaccttgtcctcccaaagtgctgggattacaggcataagccaccatgccaggcctctctttcaagtcttatattttctttcttgccgccacctacattctgtcctgcctccaccttctaaattgtcacctgttcttttatattgtcaaagctgatcaaatttacattttgttccctactttagttaagacttagtcgattgactctaagttgagaaacagtaagcatttacactgttaagactatttagtctgggcatggttggtggctcacacctgtaatcccagcactttaggaggctgaggtgggagatttgcttgagcctaggaatttgaggccagcgtgggcaacatagcgagaccctcatctatatatatattttaatgttttttaattagctgggtgtgatgatgtgcacctatagtcatggctactctggagaattgcttgagcccaggagttcgaggttacagtgagctgtgattgtgccagcctgggtgacagaccaagaccctgtctctaaaaataaaaaaaaaattttaaagactatataaatattacaaggccaaatttacattctgtttcttgtacagttttgtgtgggaactctctagagtttttttaatttttcccccttttttgtttcccttaggttcttcttttttcccttctttcattgcctacctgtactgtagcctaaaagtcttatcactctgtgctttgaaatctttgggtttcccactttttcttaggtaccttcctcctggagcctctctcctccttttctgacctcactgcttgctctaggcctgctcaaggccatcatcccgaggcgccctcctcccctgagtcggctctgcaattcctgaattccattttgtcttctcagtgcatttctccgttttgtaatcacgtcacaaagaaactccttaagaaagtatagaaggtaaattttctgagttcttggaaatctgaagctatccttgtacttgtttgatactttgactaggtacagaattataggttgaagtcattttcttcagaactttgaaggcatagtttcattatcttgaggcttcagtgttgatgctgagaacttggttgcccatcttattccattgtgtaatacctgggatttttttctccgggaacttttttttttctatgttcctggtgtctgaaatttcactgtggtatgtctagatgctagttaggtacattaggtacccttttaatttgaaaattcattctcttccgtgtgggaaatactcttgcattatttgttttaaaatttgctgtccttgttttcattgttctctggtggaaattctgttagttggatgataagcccttactttaatctgtcagttgtatattttttctctcttgatttttgacttgatcttgttggtctactcttgaatacttgcttgacttgatctttagtctccttactgaacattttaaaaatgtaggcaagcatattttttaatttccacaaactttttcttgttctatttttcatagtatcttactttgtggatacagaatcatctcaactgtctgaagatcctaattaaagggattttttttttcttttcaaggaattcactcttgtcttctaattaatggagtcagagtcagattttatgctttttttcttgctctttcgattatggaatttttttcaaaaacatctgcagatagtggttcctagtttaaggaaaggtagtgcagaggcttacctagaattgtgctgtgggctgagcttttctgcaggcaggtttagctttcaatgaagcagacaaggagctgcaattggccttgcagttgtagaggaatttcttgggggagcaggttggtatgcttacactcctactggttgtctattaaaaatattaaaattttgtcttttaaatgtctgtctctggcagtaccattcacaagccttcttctctgccttacatccttcttggtttttactcattgctgcaatctctcacagttggatggccctttgtttcatccaaattcaaggcttgatatatcatctctgcactgtgactctcacatttttatatctccagcctggaccttgccctgaattcctcatttctgtccaaccactttatatttcttcttggaggtgtaataaatcatttcaaacttgtccaaagctcaactatgaattttcctctcctgtctgttcttcctgtagtcttcctcattttagtttattggtgacttcacctttccagtttctgagacagaatcctgttgccattctttttttctctccttctcctttccttcctcttccctctctacctctgtctccctccttcccttgttccacctgtcagcctctacctccagatttatagaattcactaccgtttatcacttctgcctctaccacccatcaaagtcactgtctggccgggtgcggtggctcatgcctgtaatcccagcactttgggaggccgaggcgggtggatcatatgaggctaggagttcgagacctgcctggccggcatagtgaaaccccgtctctactaaaaatacaaatattagctgggcatgatggcacatgcctgtagtcccagctactcaggaggctgaggtacgagaattggttgaacctgggaggcggaggttacggtgagccgagatcatgccactgcactctagccttggtgacacagtgacactctgtctccaaaaaaaaaaaggcaaaaaaaagtcaccgtctgtgatttgccttggttacttgattattggaatagtgtgttcttacaaggtgtgcctgctttcaaacttgccttccttcagtccatcccacacagcagcagcagtgatcctttacactgtaaattagatcatgctactttgcagcttagaaccccccaggggctccctgtcacactgtaagtcacagtgttctgccttctcatcacccacctgcctccctctgctctggctccccgtgcttgctgctgctcctgcacactggcctgcttgtccttcaggacgttggaagagctgcgcgtctcagatgcttttgccctctcctgagaatgtttactttggatgttctcatatctcatccatgtgtcatctttgaggccttctctggccccatccccacactccctcttttctgaagctttatttttccccataacgtttgtcaccatcaaatacatattttatgtttttgtagtttaggtatttttatccgaacgtaggtctttatgttttaacgtgaattgttttcttttagcatgtatttttttgggggtcttgagagctacctccttccccgtctcaacagagtctgtcctttttgagcagggatttatgtgtttgttctgtatggctgttactgagtgcccagagcagtgtctggcatatagtagcaggagctcagtcagtgtttgttgtctgagtaaatgtcactcctgccttgcatctaacctgcagttttcacaggggctcatttgtggttttgcctgctgtgccttacagccagtatttgtccatatattttctattacccagagattgttgacatctcatctgctgcaccttgtaacccccatctctaaaccagtgatctccatcatatttttgacctgaaaatttttgtacagtagccatttttaagtatgtataccaatatatgtattttacttacgtacacatgctgtattgatatgaatattagaaaacataagaatagaaatctgccgggcttggtggctcacgcctgtaatcccagcaatttgagaggctgagacgggcagatcattaggtcaggagttcgagaccagcctggccaacatggtgaaccgccgtctctactaaaaatacaaaaattagccgggtgtggtgatgggtgcctgtaatcccagctacttgggaagctgaggcaggagaattgcttgaacctgggaggcggaggttgcagtgagccaagattgcgccactccactgtagcctgagcgacagggtgagactccatctcggaaaataaaataaaaaaagaacagaaacccaaagatcatagggtagagatgtagatattaagttctttaattcacttttatggactcttcagaaggagagattataattgtatatgcttgatacattgtgttggactggaagcactgtgaaagattcttagtcaaggggagattttacattcaaagaaaatggaaaatccccctgctttgctcggagggaagaactgcacttaaaagtttgatgtgtattggtgtcgtcttctaggcatttcttatatctgtgaacatgtgcaccctttgtatataaagtggaattacatgtttacttacgcacacacacacatgtacatataaagcaggaattatactacccagagttctctgtgacatttttgttccacttaatgtatcatgggagagtccttgagtgtggacctaggagccagactaccgaaggtgcagaccctgcagtttactagttgatttaacctttctgtaccctagtttcctaatctataaatgaagaataacggtagcatttacttcagagttcttggtaggagtaaatgttaaaatacataagctttctctgctgatgaatatttacactggagtcttaggaagggtccttgcttattttctattctaaagttgggctggacatagtgggccatatgggtgccatcagatgggctcttgtttctctgtgacccgttctgttagacctctttcctgcttttttccttgaggttgtttatctgtcctctagtgaaccagctggtttgcaggtggtgcttttctgagagtgtcttgctgttaacagttactatggatgtcatatgccagctggttctgttaaaaaaaagtctgtgaatccaaagccttgaattttgaacattattttctgtctggaattttgaagaactgattcataaagtggagaaatgaataaagatttttattttacaaattccagcacttagcattttctttattctgttactgtgacatctatttgggaaaccaaagactaccattctttataaggattcctttttttttttttttttttttttttttgagacagattctcactctgtcacccaggctgcagtgcagtggcgcagtctcactcaccgcagcctctgccttcccaggttcaggtgattctcatgcctcagcctcccgagtagctggaattacaggcatatgccaccacgcctggctaatttttgtatttttagtggagacagggttttgccatgttggccaggctggtcttgaactcctgacctcaagtgatccacctgccttggcctcccaaagtgctggaatgacaggtgtgggcctctgtgccaggccaggattcttcttttaagagactatagtgagcagcatctaccaacttgcatccttgtatgttgcatatcttatttgtttgcttggggagtaaaccaaagtaaaaacgtcctttgtcaaattaaggaccttacaagattttctgtgttaatggattggaagtctttactattctttttttttttttttgagatggagtctccctctgtcgcctaggctggagtgcagtggcacgatctctgcttattcagtctctgcctcccgggttcaagcgattctcctgcctcagcctcctgagtagctgggataacaggcgtgcgccaccacacctggctgatttttgtatttttagcagagacgggatttcgccacattggtcaggctggtctcgaactcctgacctcataatccacccaccttggcctcccaaaatgctgggattacaggcatgagtcaccacgcccagcctagatgtctttactattcttaagatggcagtagtccccaagttgatctatggattcaactcaatccctgtttaaaccccaaattgcttttttttgtagaaatcggcaggctgatcctaaaattcatatggaaataaaaagggactgagaatagccaaaactattgaaaaagagtaacgttggcaaggttatgttgcttgatttcaaaacttactacaaagctagagtaatgaagactgtgtggtactggcataaggatgaccatacagacccgtggaccggaattgagaatccagaaataaatgcatactttcacaacccatcaatttttggcagcggtgttaagacagtttattggcaaaagaataggtttttccacaggtgatgctgggacaactgaatatccacatgaaaagaatgaagttggaaccttatcttatgtcataaacaaaaataactcaaaatggatcaaaaacctaaacttcaaaactcttagggaaaaaaatagatatgtcttggattccagaatgatttcttaaatatgacaccaaaagcacaagcaaccaaaggaaaaaagataactcggacttcatcaaaatttagtatttttgtgtttcaaaagatactatcaaaaaaaaaaaagacaacaaaatgggagagaatatttaagaaacacctgtctaataatggtctagtattaagccaaggctgagttcttatttccccatccttaagtttacacgatactatattagtgaagttgaattctgtcattaccacatgtatcttgaaagaagtttgtgtggatcacgggtccagttactttctccgccctttccctccagaggatttgtcactctcaataatgttatatactaatttcaaggggaaatacaactcaaaacaaatcagaaatctgaagcttaaaaatgttatggtttagatgatgaaaagggaaaagtacatttaattcatatcatatttagatgtaaagcacttaatgttatattgcttaacctataaagtagcgcttcagtgctctcatcatatgaagtaaataatagaaaattctttgtgtgacacatgtctgttttcagccaatcagaaaccaggattattttgtatgtaataatagggtttactggaagaggagctatacagatggtacttagaggatgtagggccctacgtattagggcttcttagttgtagcgaagagcaattggtctggtacgtttagctttttcacatttagttttgaattctgactctagaaatgtacaaccccatcttttgaattacaggttttaagatgttatttgctcttaatacgtcttaaggtaacagccttgatcactgcttttactttcgatgaaataacttaatgagctgtgaagaaaaaattatcagattttaagggagagaattttatgaaaatgtctttgaggttcctgtcacctttatgagaatgtcttcaaagtttccatcaccacctctaccaatttttcttccaccggagccagtggacttaggttccataacaagctcctcttgttcactgaatgagctagacaatatttcccaccttttaaggaaaatatcagctgatatcaatgaaattaaaggaatgaaagcagctattttgacagtggaagcaaatctttttgatctaaatgttagagtgtccaagaatgaagcaaaaatttcatctttggaggttaaaatgaatgaatattcaacaacatatgaatgcaacagacagtttgaagatcaagaagaagatactgaatcacagtcaagaactactgatgtaaaaataatcggcttccttagaaacgttgagaaaggtaaactcttaatatatgatatgttctaggtacccatcctttgatctgtatctttccacgtatgttgactgtagctctgatgtggagggagcaagttacagagaacttgaatttttcatggacctttaatgacaaatttggattctgcttgatttagcttagcaatctagaattgatcagaattccatcctctttaatggagctctctaaaacgatgttttgaaaagacagatgaacctagagcaatgaagcaaaacttgaaatgtggaagtgtggtctttcatgtgtcttgtgaaattattttaaaatgtctcattctttcatcatgtactgttgatgtgaaggagacctgttgcagtatttggatggaaagagcattcttcctgtaacttttcacctcagttttccaagcttcccacaggaatgcaacttgacctaagtgtcatcttcgttacagttcctcagaatgtgtgtttttttatggtaataattctggaaggaattgacttttttgggacgcaccagtaaaatttcatataacttatgttttaaaggaaactaactgatacaatttcaaatcgagtataggttttaaaatttaaaaacaccttttaatgaaatgtggtgcttggtgggagatggcccacttaacatctttgcactgagtaagcaaagcctgtccttgtgaagccacctgtaatggatatacccaaaatcagcatgtgggcatcttagtaagatttcagtatttgcaaccctatcagttacatccctttgtacactgtagtgcagtaccttataatgagcaagtgagtgcctgatgtctgctaagcgctgtgggggctacagaaaagtgtgacattctcccatcctcaaggagcttaacatcaaatcgaggatggaaaaaaatcagttctttgtccctattttgtgcagtcagactgctgggcatattattgttaggaatagtgaacctaataggaattaatgttaggagcctattttagaagaaataagtagttgaacatcttttcttgtggaagaggcaaagaattattatcatgctttgctaacatagggtgtggattgtagagctgagtgtcttattgttttctttgcatgcatcgaagcccagagtttgtcttttaggaactcttgtttagatgatgagagtgttttgttttgctatttcgattatcttcaaaggtcatgagtgagtcgtgatggtaagagctcaggtgatggagggaggtgcttgccatgcttattgtgcagttggctgtgatgcgagctgctgggccacaaggtgccttttcctggattttccacccgtttgccacctttactttccccgcagaattcaaattcaggaaaactgatgtcctcatagagggagaaccaggagtgttttaaattggcatttgtggtttaaccctgagtacagccttttttgtcttacaggatatgtctttggtctataaatactattaaattgaattgttgaagctttaagttacttttaagacttcaagttaagaacccagaaggattgatttttgggaaccacatgctggtattgtctgtgttgtaagcttagtgaagttttaaaatttatattctaggaactcaacagaggcaattattatcccgactgcaaatcgacccagtaatggcagaaactctgcagatgagtcaaggttggtaatgtttcaagttgtactgtaatccagccatttcagttgccatttccatttcttacaccccatttaacgtatctcggatctcttagatcctgccctaagatgttatatttagatctgtgaaaatattttagggccaggagataagatctgcatttctttcatgttatatagtgttataattttttgcctcattggaaaactttgttcctttcacaccattccaagtgtgtccctagcactgtcggctgtcactctcctgctgtcaggagtgacctgcgtttctgatttaccctcccactctacccagcttttgtcattgccatgagtggcttttgtatcctgtttttcacctggttagccttatcctcttgtacttcattttggagtcttatcaccagggccacacctggaacttgttgttctagtgttctagagccactctagtttgcctgtctcctttcctctccccacagacacacatgccaggggctactccaggactggagctgacgccttcatttttattatctctgtcctcagtgcccagcccctgccagatgcatgttcaatgtcttaaaaatgactgcaggataaacacaggcaaccatgagagacccggaatcatctcagtccttctgtttcccctaagtctgtcttttgtgggaagctctggtccctagacccctctcagtcaggactccacagtcagtcactctgttccccgaccctcccccagctttccagctcagaaagtgtgcttttcctccctaagggtcagcctccaccagaggccagatcccactgggttggtgagccactggcatgtcacccactcctccaacttcattctctgcctcctgtcttctctctgtagaggtgttcagacattctctgcccgtgattttgctctctcatctcccagcagtccgtcctgcttcctccacaggagtatttgaaaaggttgacagccgagatctgtgtgtgggatccacttcatcagctcttgtgcatgttttctcttctgcctccttcagcttttcattgtacccatggtgcacgcagtttgaaatagcaagtagttctgtgaggcttatgaatgactgcagtccttagctcctatcacattttttattctaagatccctttgtttctgcatattctattaattttctaaaaacatactgattttgtgtacacaatactctttgttatttctctgtggtctgaaaggtggttttgacatttttcccctccctgcttcgtcttgttttctctaagtggtctgttttggctgtcttttatgctggaggttcccctctgatgtctggggatcctaggtggtcttacatttaagagtggagcactcagaaggtcactggtattctgggttcatgagttggggcatggggcactttgactttctgtttgaaactagaccctgtggtggaaagtgatttgtcctgcctgtctggtttgtgggcaccctgatgtcactgccttcaagactttcctctcaggctggtcagcttctccaaaacaaagtttttcaagtaatagcctggtagtcagagttctgcgagcttaagtggggaaagaaggctgggggaggcacctcaccattaattattatgtaatgtttatttaaccctcccccaaccattgtcagtccagtacttctttcatcatggctggtgtctcttggtccagggactctgttcttatcctctgaagagtctaaagctccactttctccaagggagaatgcatgcagtgggtaaagatttatcaggaaatctaattgcctttaaaaatttttaacagtgtaccttcaggtgattttgtcgtagcatctttctggcagagaccctaatgcttcatccataggcctctccgaagattatctacaggaaagcacatcaccagtcatcccaggtgtcttcagtgtagaggtcgggattggtgtggcaagcatcaaaaccaagaaaacagtggccaggtgcagtggctcacgcccataatcccagcacttggggaagccaaggcaggcagatcacttcaggtcaggagttccagaccagcctggccaacatggcgaaacccaatctctactaaaaaatacaaaaattagccaggcgtggtggtgcacatctgtaatcccagctactaaggaggctgaggcaggagccttgcttgaacccaggaggcggaggttgcagtgagctgagctcgcaccactgcactccagcctgggtgacagagcaagactgtctcaaacaaagaaaacagatacatggaattagagttgaagaagaactaactgcttcttggacacatctaatacacctcttttttgcctgccatttcttccatttcttcctaaggtccttttactgccagttcctgagcctttggagaatcttgtggtctgaattggattgcttcattattgccttagaattcagcttttacagatcccctgagttcttaatcatctgttttccactttgaaaatttctttttacacttattttctttgtgagtttatgctttcaaaacaaaaacaaaacccttattgacatttctgtgggctttcaggagggaacaaaaagtaaatgcatggggtcagcctgtggtctctactcagaagatgttacttactcccccgtctgtctggtctccatgtgacctgggctgctaacgttccgcttgcagagaggtgtgcgggagggaccggtgcacgctttcctcaaccctggagcatgttacacttgggttcccatactttctccaagctttgacctttcggcttccagttcactctgtctttattcttctcattccctttcattctcatgtgtcagcgcatctcctccattcctcctcaaaaggttagctttgctctctcccaccttcagcattattttcatctcttctgtgttcacccaacctatgaactggtagaactccttcgtctcagaaagtgcagagtggtgggaaggagtgaagcagcccctgggccactgttgggacccacctttgacagttgtgagacctcggtgaatcatttaataacttggagctgcaaacagtcatctgtaacatgggaggaaaccgactttgtaggctttgagtgaggattcagtgagagacggccaccctgaatatgttaaacacttctgtcaccttcggttttgactcagcatcttatttctgtccccccacctacaggtcaaatctgaattttctacttcctcttaaacatgggagagtcccacaaagactttaaatctaacatggaaatgtatctttgccccttttaactttgctctttttcttttgctaagtttctcatcccagctttctcttccgcctgtctccctttaccatctgtactgcccttgctggggaaggcgggcacgccccttcccaggatggagcatgtcttctcttcctgtcaggtgtgtgagaccaggacagacagcagagaatcttttcattcagagcctcaccctctgtcccgggcaacagcaggtcgagaactctggttcttccttaacactgtttttctaaaaaccagtttgatcaggccacttccttccttaggaacctctcttgatttcttttctcttttttttttttttggtttgagatggagtctccctctgtcactcgtgctggagtgcagtggcacaatcctgctcattgcagccttgacctcctgggcccaagcacttctcccacctcagcctcccaagtagctgggactgcgggcatgtgctcccacgcctggctaattttatttatttatttattttctggttgatgggaggtctcactatgttgcctaggccggtctcaaactcctgggcttatggaatccttgtgccttggcctcccagaatgttgggattacagacatgaaccgccacaccaggccacttgatttcttactaattatagaccagaatcgagagtcactgagacatagaagaacctttattatatgtgtcagccttccttggtatgtactgctgagcccaccacacacacccttccagccattccacattctaacctttctcagatgccttcggccttgtgaaagcccctttccttctacgtgcgttttcctctgcctgaagtgctgtgttcgtttctccgagtctctctccttgtttattcctgcttgttcctttactgctgacttcagatgttcctccttgctaagcttttcgttggttcttggctggagtgggctgttctgtattctcagcaccttgttcacatcccttttgggtcatgctattctgaaattgtatatgtgtctgtttttctttttttctttgtgtatctagctcagttctcttagttgttcagtaaatactcagtgaatgaacataaatgaataccctgtaaattttggtctctaagctttaaaagaagtgtattaacttcagtccgttgatggcgtattgataggtcagccattctgggttgtaggtcttggcatattttataaaatagtagatgatgtgagcttatggttatttgcattaaaggccagtgtttttcttgatacatatgtttaagtgtccattcacctttcagttaccttttaaagtagtcctcggtttataaccaactggaaattataccacttgaattctttttatcaggacatgattctaagtggtactgtgcgaagtgaacaaaccagattttggaaaagtggttcagcagtctgtgtattctaattatagggagcattaggactcaaattctccaggtttttagaaaagatttttgtactttaagggtatattgttaatatctgttgagatgcctcacctgagaacctttctctgctgtggttagggagtgttaatcagaatcacttgtgccgtgccctacgcgagaaggactccttgagttctttgaaaacatgtttggaatagaattatagccctgttttcctgagtggaaccagttgtgattttcctttgaaataatttgaatatataaaagattgacattcttctcacatatataatgttgggaatgtaaggtatattcaaaagtaaacatttgtggccaatttttttggctcagattactatgacatggaatccatggtccatgcagacacaagatcatttattctgaagaagccaaagctgtctgaggaagtagtagtggcaccaaaccaagagtcggggatgaagactgcagattcccttcgggtactttcaggacaccttatgcagacacggtagatggtttctttttcttgtgtagttaatttgtgtgattagatagtaaaggttaaccattcgtttgcagcttccctcctccccgccctaaccgctagcgtagagtgctttcattgattcagtagctagcccatgaatagttagccaaattcagttttcaagaattccagttcatctttcttgttcagaaatccattaacctacaaattacaactcagtgtatgatttaactctattaaagattcttttctttatgcaaattcaggaaatgcaagtttaaaagccagctgaccataatcaggtcagctctaaagagagttggcagatcaggtttgggtgatttttcccttagaaaattgactgtttctataaaagaagaaacatacagataattagcataaatgctgctggcccttgtgttctgagcattgatgctaattttttggtttgtttccatgttgaccctatgaagatcgaatgggtgatggggtcaggcttgaggggagattgtccttagtaagtacaggctggagggtcactggtgatgccactgtgactgttcatggccatcgtgtgttagcagagaacccaccagtgctgcacctggtagccctacctagtctttttttattgaaccaaacgcaaagccaagggagtgatagttctgctgaagagcactttagggggctcagcgttttgtgtttgtttccctaattctatggtattttttatctgtctggcagagatcttgtacaaccagataaacctgcaagtcccaagtttatagtgacgctggatggtgtccccagccccccaggatacatgtcagatcaagaggaggacatgtgctttgaaggaatgaaacccgtaaaccaaactgcagcctcaaacaagggactcagaggtctcctccacccacagcagttgcacttgctgagcaggcagcttgaggacccaaatggtagcttttctaacggtgtgttgagagctcagattttcagggtgctgtcattgtgaagggaatctttgacttgtttctctaccttgaatgaatattggttaaaggccttgcttttatttatattcagtaatggccttttttcttctttcagacaaacccaccaagtacatttcagactctttttcctgtgtctttttcataggtgggctgttactccagtttgaaaacggagttcagccatggaacctgagagacctcttccgcttatgctggctaaaggatgaaccaccattcttgttgccttctttacctttgtattttcttcagaaactgtactgccactttgcccttttatcagcaatagtctcttgcaattaacttgagagaaaaatttagatttgatgctatttctacctcagtgaaatttctttgaaaggagtttctcacctaatctatcaagatcttggaactgtttaaattaatgttgaagagtaatatttagcagaactcagatgaactcatttcagatagcaccatagtttttggcaggtgacagtttcttatcaccgtttctttcactgggtatcagtggtagctgcaacgccactgatcatttccattcatgatagagaatggtaattatgttccttatatcttctaaaatatttagaagcacctcttcattggcaggagggataattactcaatcttaaaagcgtacagattcaaaggaaaaacagtaatggattttgaaacatttccttgagtaatcctcttcttggaagagatatgaaaatgtattgaatacctttctcgatcattaaaaatagaatagacttcagagggaaatcatatgttagtggagcaataacacttagctttattttaattggttgcgtttcctactgtgaatcaatgacgtagtgtcgtggttttgattagtggagggagttgaaaatctgaccctatcaacaggaagaaaaacttaaaaaatagtaaaagctgcagtaggcagtcccgatttattgactctgtatgttttgtctaaagagaagactccagtgttttcactactcttgattttcaatttggtaccttaattttttggtctattaggatctggtttcatttaaatgtaggtgtccatatgaggctttatggggtatacatgtagcagcagtgacaccataaataatatgttagtaaaaattcttgccagtgctgtggccattgtgctgacagccatgatgagtggtgagcctcctttcccattgctttgactggggactcagtgtttccctgctgctcaaggatgaagctttgtaagattagcataggggtgtggctggagagactcctgcagaacagttctcaggagtctctagtctctgcaccacttcccctgtgagcagggagtttgaaactgcaattgcttctggttggttttatgttgggttgtttcaaggatgctaccaacaacaacatctgttttaacctgctgtcttttcactcactgtcatatggcagcacagattttatagcttgctttctttgttttttttttttttgagatagagtctctctgtcccccaggctggagtgcaatggagccatctcagctcactgcaacttctgccttccaggttgaaagccattcttctgcctcagtctcccaagtagctgggattacaggcatgcaccatcacacctggctaattttgtagtttaagtagagacggggttttaccatgttggtcaggctaatctccaactcctgacctcaagtgatccaccaacctcggcctcccaaagttctgggattacaggtgtgagccaccgtgcctggcctatagctttcaataaaaggtgaatttgcctcttaaaatttgaacagaaagttttaatagtttacaaagtcggtgtcagccagtgaagactaggggcatgaccttcgtatgacttaatgtttttaaaagaaagataaagtttctttgtaaggtattattgtaataatcacatttctttgtaaagtattatattgttcctgagtatctagctactttgctttccagctaggcttctcttgggtattctcttaatcttttatttgtactgggttcttgtgtatatattatagtctgctgtgtgtaatttattataggaaaagggtaagacacatttactttgcggggatgacacaaaaaacctgtaaaaattagagaaacttccagtcatctcacattttctttggaaccgattattcttgtatcttagaactaaaatgacttatactgttttgtttttagaaagggtatccctcctgttgcccaggctggagtgcattggcacagtcatggctcactgcagcctccacctcccaggctcaagtgattctcccacctcagcctcctgagtagttggttactacaggtgcacaccaccatgcctggctaattttttgtattttttgtagagatggggtttcaccatgttgcccaggctggtctgaaactcctgagctcaagtgatctgcccgcctcggcctcccaaagtgctggggttacaggcatgagccaccacatcctatttaaagcttaaataggacttttactatttttaaagtagcatagaaaactgtttgtatcaggcatagtcataattgctctttgatgctgctcctatctgggctgcatgactacatttgtgtgccttgttctcctgtagtgaggacagaatgtgggtcactggaacagtaagtactcatagaactagctgctgctgctattacgactggttgcctgttttgcattttttccgtttaatcatcagactctaaggaagacattattttctctttgtatagatgaggaaacagaattccaaaaagttagctaacatttgcacagagtgtctggctgagcaactaagtggcagagtcagattttaactgacctctggcaagaggactagaggaatacagttgaagtgatacttgctttcatgaacatgaatgtgaaccataatacataatacccatgatgctattttgtggggagtttaaggtgtctcagtccagaaattagcagctgattattgcctgtagctgtaattttacttattcagtgttatttaataaattgccagcattacaatttcgatgaaggcagatttttggcttactgaaacaggataaaaatctggcaacaggggtcccactttgccctgtcatagtaatcgaagctgtgattggatgtggcacagggagtggagtggatgggtgtgcacttgctttccaggctgctgctccccgtctgtcccttattgcatttatcatcttcagcccagtcagtcttgctgttaggggaactgcccagtctctgtaagtgatggcatttgtgaccccattgtaggtaaaaatgttttcccctttttagacattgctggctgagcgcggtggctcatgcctataatcccagcactttgggaggccgaggtgggtggatcgcttaagtcctggagttcaagaccagcctgggcaacgtggggaaaccctgtagccaggcgtggtggcacgtgctacttggtaggggctgaggtgggagtatcacttgagcctgggaggcagaggttgcagtgagccgagattacaccactggcacaccactgtactccatcctgggtgacagagcaggaccctgtcgtaaaaaaaaaaaaaaaaaaaaaaagtaaaagacattgctgagtttcgcacctggacttacagctcagcaggtgggaatccttttgtatttgggccactcatcatcttgctggcgtgtgaggattcacatctccttatcaccttacctgttttcagtttttatttaattttattagttccccacttgacgtccttctctatttttaattcagctatgaattagtattgagaattagaatttttggtgaaaaatttggccgtagttgcagagtcactgtcctctttccttttcacagtgagaactgttgtcttcttcctggcaaccttttataggattctatggccagtgttaatcccataatttgagctcacttattttatatgactgtacatttaacagaagattctaagacaggtttgagggaaatatgttaaaggtgctgtgtactgaattgatcataatgaatgaaatacttttatttcctttccctttgtagctgagatgagtgaactgagtgtggcacagaaaccagaaaaacttttggagcgctgcaagtactggcctgcttgtaaaaatggggatgagtgtgcctaccatcaccccatctcaccctgcaagtgagtaccatccccccatctcaccctgcaagtgagtaccatccccccatctcaccctgcaagtaccatcccccatctcacctggcaagtaccatcccatctcacccagcaagtaccatcccccacatctcaaccctcaagtgagtaccatcccatctcaccctgcaagtaccatcccatttcaccctgcaagtaccatcccccatctcaccctgcaagtaccatctccccatctcaccctgtaactaccatcccatctcaccctgcaagtgagtaccatccctgcatttcaccctgcaagtaccatctcatctcaccctgcaagtaccaccccctcatctcaccctgcaagtatcatcccccatctagccctgtaagtgcgagtaccatcccccatcttaccctgcaagtaccatcacccacttcaccctgcaagtaccatcccccacctcagcctgcaagtaccatcccccacctcagcctgcaagtaccatcccctatctcaccctgcaagtaccatccccatctcaccctgcaagtatcatcccccacctcaccctgcaagtaccatcccccatctcaccctgcaattgagtaccatcccccatctcaccctgcaagtaccatcccccatctcaccctgcaagtgagtaccatcccccatctcaccttgcaagtaccatcccccatctcaccctgcaagtaccatcccccatctcaccctgcaagtatcatctcaccctgcaagtgagtaccatccccccatctcatcctgcaagtaccatcccccatctcaccctgcaagtaccatcccccatctcaccctgcaagtaccatcccccatcttaccctgcaagtgaataccatccccatctcaccctgcaagtgaataccatccccatctcaccctgcaagtgaataccatcccccatctcaccctgcaagtgaataccatccccatctcatcctgcaagtgaataccatccccatctcaccctgcaagtcatagccagctgattttggctttcagtttagtgtctgtatcttacaccttattttgtttttgtttttctgtggacaagtttttagttttataactaaatggagtgacaattaccatggccctctccagagtagcgtatttcttgttcatgtatgtttgttgagaggcaagggtgggggggctttgtttgtgcctcggacctgtgagatactgaaatacctggggttccttaagaattctgtacgtttaagcagatgggtatatggtaactgccccagtttgtatgcattttggccacacgcagtatacacagattttgaggagttgagggaaaagttagttatgggtaatgaaaacattttggacttgggttaaatttttccttacaagctggctggctcaatgtaatgagctttatgagatggctttttggggcttcttttttttgccgggggtaggtcctatggatggaatcttcatttttaattcttttaaggaaatgatgtgggaataatacagctgtacatataaggagagtatgggatgagtctttttgtatcacaaagccttgcatagaggatgtgtttattgtattaatgagttcactgcataaaatatataccttttttattaagtggtgtgatttttatcacaaaagcttgtctttcttggtggcttggcttgagttaaaagcctgtgtttgtgttatcccaagctttggaataaatgattgtgtcctattttgatatatggtcttattttaaaatattctttttgttgctgttttttttgcatttctcaaaacaagtagtgatggggagtgtaaagagcccttatacacagaactaataatgcattgagaagattgaatatgaaatatgctttttttttgttttgtagagccttccccaattgtaaatttgctgaaaaatgtttgtttgttcacccaaattgtaaatatgatgcaaagtgtactaaaccagattgtcccttcactcatgtgagtagaagaattccagtactgtctccaaaaccaggtgagtgagtgactgtgctactacatttgggtaaaaaatataaaatggcattttgtgactgtaaatggaattgaacaaacaaaagatggtttcagaaataattttggcaggatcagttaatccaaccagtctttaaagagcaagtgtgcctatctgtagtattccgaagtattttgactagtgaatatataaaccttaccattctaatttaaaaatggttttcactttcaaaaaaaacatcagtagactgcattaaaaatgggttttccaaacagattggagatcagtcctggtttttattttgttagcagttgcaccaccagcaccaccttccagtagtcagctctgccgttacttccctgcttgtaagaagatggaatgtcccttctatcatccaaaagtaagaacttctattttctcaaatcaatttagtgacaacatctcaatttcctcatttaacttcttttttgtcagagttactacattggtgcaaaagtaattgcgatttttgccagtaaaactattaagttgttcctcgtcactgaacctccatctggccccttaggccaagtggtctgaaactgttcaatgttagtatcccaagcactcagtggggggaagcatatctttgctagtcacattttccattattccctgcatttaagtatatggatgggttttagcgggggctggggggcagtttgaacctaatgtcagaactgagatgaagaaatccagtaggtactgcttaaaaccatccaaacttgtactgatgatggttgatgaatctccagatgtttagttggtcaaaatgaattatctccttcttgccccggtagcttgaggaccatatgaaggccttcacttgcccccatctgtaactgggcgtagatgagggtactcagtgaagagtgtaagggataattagaagtttttgtggtatgctaaactaccttttgaaattgtacttgctgtgattctttgactagaattttgtgtctcaaggttaagtccatttttcaaggcttcactagtattaaaatggtccttatagatggaatctcttactctgttaatggttagggtgggctggttattgtctcctaagttgtatgttggccaggtgaggtgggtcaggcctgctatcctagtactttgggaggtagaggcagaagtggaaggatcgtttgagcccgggagtttgaaaccagcctaggcaacatttaagagaccccatctcttaaaaaaaaaaaaaacaggcttggtagcacacgcctgtagtcccagctactcgggagactgaggcaagaggtcatgccacttcactccagcctgggtgacagagtgagaccctgtctcaaataataaaataatgtgtttacttatattagccttgtggatattgttgaagctctgttatctctattcagcattgtaggtttaacactcaatgtacaagaccggactgcacattctaccatcccaccattaatgtcccaccacgacatgccttgaaatggattcgacctcaaaccaggtaaacattcaaattcgtttttctcatgtcagttcaaattcttttttctaatttgcagtttctaaatttataagcacacaaaattggaaactagactgttactttgaatttttttctttgctgtttaattatagaaggctcctttggcaaaataatttactacatgggctaaattttacattatccagtggttacttttttaacctagattatcttgctctgttgcccaggttggagtgcagtcacactatcatagctcactgcagcctcaaacccctgggttcaatccatcctcccacctgtagctgagactacaagcgtgtgcctctatacctggctaattttttttattttaagtagagatggggtcttgaactcctgagctgaagcgatatccttccaccgtggccttccaaagtaccaggattacaggcatgagccaccacacccagccagattttaacttctcattatatactacgcaaacatatactaaggccagcaggagtatatatatgtgtactgtacttgaatttcacatccattttcttcgacattagcaactgggagatactgaaaggaagtttcaaaatattttagtgtggccagaaaatttaattacatatggtattatcttttatctacctgacataattgaattatttttaaaaatctgccatttatattgtaatcttatgaccaaatatttattgcttaaaactagtcaactttttaaactgagatatatggtatatatggatacaaagcagataattaaaacaatttttggttctgttcattcagcgaatagcacccagtcctgcctggcagaagatcatgcagtttggaagttttcatgtactgatgaaagatactctacagaacttgtcaaatctttgaaacttggaatatattgctttcataatatgaagttttattgccta

SEQ ID NO: 15896 - DNA, 48988 bp, Homo sapiens
gcggccgggggcggaacggaggaggaggcggtggtgtcccggctgcggggtaggagtccgcggcagcctccgggtaagccaagcgccgcgcagtgctgagttcccgcacgccgcagagccatggagatcggcaccgagatcagccgcaagatccgggtgaggcccgtgccggtcgggggtgggaagccaggtctcggcgagcgggcggttgtcaggagtaacggggactgtgggcccgggtggacgccgcggcctggcctccgctggacgctcctggcgggctgcggctcctcctcgtccaggccgcctcggccctggggacatttgcggcctcggagcgtggctgcggctgaagtagccgccgggaaatggaaggacaggcgcaggcccggctggagccaccaccgcggcgcacggcgccgctttggatccgctgcgggaggtgggcgccgcggggctggggctggagctggagtggggtgcggggtggggggcggtgcaggcgaggctcctcccagcccccgcccgggggatccgaggtgcgcgcaccagcaaagtggcctcagccgctgcagagtccggtcttgttttcctagagccgcctttctcacatgcacgtttgctctttttctctcagagtgccattaaggggaaattacaagaattaggagcttatgttggtaagtgtttttttggttgttagtcttacagaatttagagtttgcagctaatagaattttagtgaatgcgtatttctcaccgtactttggacattgggagagactcccttctaccttcttcaaatcttatactccctggttacttctttatcatctttttgcaaccttgttttttttctcccaaacctccttctgttatggtgttttgaaatttagtttcctccgttaaggctctgtttgaccgaattttattttatgtttttcctattctctctctctctcattttaaattctagggacgggtctcgctacgttgcccaggctggtcttaactcctgggctcaagcaattatctgaccttagcctccctaggtgctgggagtgcggggattactggtgtgagccaccatgcctgtttaaagtttcctattcttgttactttcctcttgacatttgtttttagaactctgatgttggatgtgaatgtttgatgctttctggcatttgcttctgtaatggttcagtgagttttattttccgatctctttatgttttccctctctctctgaaacagtaaggctttttccgtctctttattcttttataatttgagtgtttactctgggtcaggtactgtgcttaactattgtatatgtattaactcaggataatccctacgagaatcctggaaggtaagtggcagtatctttgactgtgtaaacaaggaaactgaggctttgcctacttgagcaaggttttatggtttgcccccaaagctggtgcctcctataaaaataatagctaccactaatgacagtggttctcaaagtgtgggagactccaagggcctctgaagtcaaaactgttttcatattaatactaagatggtatttgttatttttcactgtggtggtggtgtttggattgtgtaaaactaatggttgataaaacttgtcagcatagtaacaccataatgaaatcatattcaaatcactccccccttgtagtttttttctttttgagccaattacacttaaaatgtcattgatgaagatgtgaagtccagggtttacaaaatattttttatcttcttagtattcagtgcgaggaaatagaaatgctcataaaacatttttattgtatactgaaatacgattgttctgaggaaaatcattttagttgagaactaagctagccacctctttcagggaacatcatttttaacttcaaagtactgacaaactggttacatacactaggatatttggcagatatttacttgaaagtgagcaaagaaaagaatccatagtctttgttgccaatcacatgtgagctttcaaatgaaaattagaattttggaaaatctgagcctgcctccatgaatttcacagcttcccagtacttaaaaaatttctgattaaataaatggtgatttaaaaaaaatttgttattattattattttttttgagatggaatttcactcgttgcccaggctggagtgcagtggcgtgatcttggctcactgcaagctctgcctcccgggttcaagcgattcttttgcctcagcctcccgagtagctgggattacaggcatctgccactacacccagctaattttttgtatttttagtagagacagggtttcaccatgttggccaggctggtctcaaactcctgaccttgtgattcgcgtgcctcagcctcccaaagtgctgggattacaggtgtcagccactgcatccggccaactcaatggcgatattaaaaaataattattttatactgcataatgaaatatatcaacgtgtcagtggtttttgtagctaagtgaaccaatcttttctaaataaccaatgcataatattacaaaattatgcagtggattaaagatttatttaaactctggggtgggtcagtggatttttgtgcaacagttcaaaaaggtcattgacgtatttgacattccacgttgctttaacatttaataagctaccacttgtttagttttggtgtagtgtcacagaagaatatccaccttatctgaaaagactatcagaatactcctttttcaactgcatatctgtgagaccagattttttcatattcttcagtcataagcacatagaacaagatatataaaaatatgaaacaaggccagtctttgcagtaaatttttctttttcttttttttgagatggggtctcactctgtggttcgggctggagtgcagtggtgcaatcttggctcactgcaacctccgcctcccaggttcaagcaattctcctgcctcagcttcccgagtagctgggattacaggcacctgccaccaccccgccccccccccccggctaatttttgtgtttttagtggagacggtgtttcaccatgttggccaggctgatctcgaactcctgaccttaggtgatccacttgtctcagcctcccagagtgctgggattacaggtgtgagccactgtgccttgcctaaatttttttttggaaaatttaataatgttacttgtgttaatataattggatttgtgattaacatgtgatggatttattttttaatgaattaataaatactttttaattaaaaatgatcagttctaattttgaacaccataaataatagaacctgcataaaccaaagaaggggcccaagaccaaacagtttgagaattggtaatttatggagtacttaccaccatttgctgggcactttcataaacgatttgttgtcaggattgttggaagactaacagatgagagaattgaggctcagagaaaataaagctgaaccaagatttatttattcttttattctttcaacacttgaactgcattttttatagttttctttgaaacaaaaaaagtacttctgaaatgaacctttctgcctgcatagaaatattacaagtatttaaggtattaaagaaatttgtcacagcatggtggttcacgcctgtaatcacagcactttgggaggccgaggtgggtggatcacttgaggtcaggagttcgagaccagcctagtcaacatgctgaaacctggtgtctactaaaaatacaaacattagctgggtgtggtggcaggtgcctgtaatcccagctactcgggaggctgaggcaggagaatcgcttgaacccaggaagcagagcttgcagtgagccgagattgtgccactacactccaacctgggagacagagcaagactctgtcgtaaaagaaaaaaaaaaaaaagagaactggaatggagttttgagggtcagagattagagttcctgataacagcttttgcttccttatcttcttagtgaggtttttgtttttttgttcttttaaatcctagacctcactctcataatcactgtaggattaccactaggagggtgttttttggcttcttttatttattttatttatttatttttttttgagacagagtcttgctctgttgcccaggctggagtgcagtggcaggatctgagcgcactgcaagctccgcctcctgggttcacaccattctcctgcctcggcctcccgagtagctgagactataggcgctcaccaccacacccggctaattttttgtatttttagtagagacagggtttcactgtgttagccaggatggtctcaatctcctaaccttgtgatctgcccaccttggcctcccaaagtgctgggattacaggcatgagccaccgcgcctggccttttttcttttttttttttttttatcctagacctcacccttataatcattgtaggattaccactgtgagggtaaaaccgtgcattgagttgacattatttaatgttaaaattgatttttttaaatgatgtggagcttttgggtctatttgtttattcgatgttgctacaagtttgttactgtgagtaattgaaacctgcctttagcaagggtaaagatgttcacttgagaaatgagtgttattttgaaactttgcaaattaaaactaaacaaaactcaattctttttcttggggaatgttcaaatatttcccataagcttctttgaaattaataagcattattaaaaagattcaaggaagtgaatgcatgctcaagtttgaccctataattcagaatgtttagttttgtaagtatcaattattcttaatttccattcttctagtatttgaaatacctgtggaatgaagagaaaaaaattaaagctaagccatcttgtccaatgtaattccagtagagctctgcgactctaaagcttagagctacatctatattttcaagcacatcaactttaagaagaaagttttgaggaaacaaagttttgatctacctttccttttaaatagatgaagaacttcctgattacattatggtgatggtggccaacaagaaaagtcaggaccaaatgacagaggatctgtccctgtttctagggaacaacacaattcgattcaccgtatggtatgtttctgaatttttgtgcctcagaccaaagtttggcacaagcctgagttgatattctgtccaaagagaggttcttgacacttgagttaggtttactttggagaggcagtttgtgagtgatgagagcacagcctctgtattagtccattttcacagtgctatgaagaaatacccgagactgggtaatttctaaaagaaagaggtttaattgactcagagttccacatggctggggaggccccaggaaggggaagcaagcaccttcttcacaagtcgacaggaaagagaagagtgaaggaggaacttccagagacttatataaaatcatcagatcttgtgagaactcactgtctcttgagaactcgggaactcactgtctcttgagaactcactatcatgagaacatcatgggggaaaccacccccatgacccagtcacctccctcccttgacaggtggggattacaattcaatataagatttgggtggggacacagagccaaaccttatcagcctctgaagccagacagccaaagttgaatcctggctgtgtcttgccttggtttctctagctataaaatggaaatagtacagccacttgctttataaaattattattgaggatcaaatgggctaatatgtgtaaagtacttataggtgtccctagcattttcctaaggaattcttagtatatgtcggctatacttaatatgtttcttttgtaaacttctatatctttttttttgagacagggtcttgctctgtcaccaggctggagcacagtggtacaatcatggctcgctgcagcctcgatctcctggtttcaagtgatcatcccattgcagtcccctccttcctgaactcccatgcctgactaatttttaaattttttgttcagacagggtcttagtatgttgccctggatgctcttgaactcctgggctcaagcagtcctcctgccttggccttcagaagtcttggggttataggtatgagccactgcacctggccagcttctgtatcttatagttccttttcccccaccaaaaccagttacagatgtttttttgaactgggttggcttcttacattgccttttacaatgagttacctttagagggcaaggttttctgtttctcacttttctgtttcttactttttaagctttttgttaaactcacaccttcattttgagtaataattgtagtgtaatgttacagcatattttgagattataagtttttttaagtttggaattttaaaataggcaactttgcttttatacataaattactgttatatgcctttagttgagaatactgactagaagagtaagattcaacttaagatgctaggtcctggtaccaggtttgaggtaaagtgaggatgagggctggaggataatgatgtagctgagaatagacagacgaaatactttattaggcttctcaggctaggaactaccagttaccgtgaaaggtgatgatgtagcagaagtgagcaagtggcctgccgaatttgagtgcaagaggaggcactgagtggggagatgagcctggttaagttcttgcctttataccaaaggtcgtcttcaaggtgtttttgcccaagtaggcaactgtatgcttatcaaccgtcttgaaattctgcacagaattctctgggtttatacattgcacaaatttgaagaacattgtatagtggtcatcagttgttatgatacactgctgcctcactgtgggtgacccaacccatttgttacaatttgtccccagaggttattccctcccagccccccacaaaaaaagactgtgggtcttttgactgggaaaattaccattattgtgagtactatttttttttctaaagcgaccgagtagatccttttctccgataacttgatagaatacttagatttttaaaacagactaccaaatgaatttaaaaccaaattaattcaacattctcatctggccataaattgagttctttaacatgtagtgaagcaaagggtgatgtccccattttggcactttgctttcttaagttagtgttcattaacaccagccccaaacagactattgtgattatttggagccttgaagtaattgtgtccgtggggacagtagcatgtgactagggttctcattgaaacatgaggtttctggcatattttgagaggtactgggaagggatgtaaggcaaagtacctcatttataactaccaaaacaggttatgttacaagcaagattacagccttacagcatcagttttgaaagtaatagagtgaaatgatatagcatagtttgagattataacttgttttaacctctcagaattaagttgtccaagacaccatctagtttaagcagttaatataagctgcttaaatggtggtaataataagcaatattacatgtttatgatacttgttttactgtaagctacagtaaatctttagtacttacaaacagggtgacatattttgtagactaagactggtcagatgatattctttcccatatttttgcagaggctagatgttgaaaacagtgaagaaaaaaatacaattttttattgacttctgtaggatttatacaaagcccttttttaaaaatgtgaagtttgaaagttcataccatttattcactaaatacagtttatcagtatttatctcagctaggtgcggtggctcacgcccgtaatctcaacactttgggaggctgaggcaggtggttctctcaagtccaggacttcaagaccagcctggacaacacagtgaaaccccatctctatttaaaaataataaaaatataaaaaaatttaaaaaattatctctgaatataatgtcataaatttagagtgacagttgaaatgaaatctttcttaacagaaggtttatttttgttttttgtttttttcctcaggcttcatggtgtattagataaacttcgctctgttacaactggtaagattcataacttttttttttaatttctgcttgctatggcatatgatttgtttctttctaaagtcatagtgctttgggaaaaacccatcaatttcaaaacggttcatttgaacttttttagaaagcacatacttttatgaacttaagagcagtaaatttaacataattcaaagataatttaagtgtgggagagggagcagtgcactttatccgaaggaaataattacatatatgtgcaaagatttagcctcaaggatatttcagtattttataattgaaaacaatttaaaagttcagtcataataaacgaaattgttgtattaccatgtgtggaataatatttaactattaaaaataatgttgtggaagaataacagaatatacacgcataagatacatgttttaaaaaatgtgtatatatgctcttcccccgaaaaatcacctttgagataattggtgatttttattatatttttaaaattttctacaataaacatactgcttttgaattggtgatgaggaaggaaacgacttaaagtaataaaaatagatggccgggcacggtggctcacgcctgtaatcccagcattttgggaggccaaggtgggcggatcatgggctcaggagatggagaccatcttggccaaccaacatggtgaatctccgtctctactaaaaatacaaaaattagccaggcatcgtggcacatgcctgtaatcccagctacttgggaggccggggcaggagaatcgcttgaaccagggatttggaggttgcagggagccgagaacgcgccactgccctccagcctggcgacagagcgagactccatctcaaaaataaataaataaataaaaataagaaataaaaatagattaaaaggactgtatttttcttttcagaaccctctagtctgaagtcttctgataccaacatctttgatagtaacgtgccttcaaacaagagcaatttcagtcggggagatgagaggaggcatgaagctgcagtgccaccacttgccattcctagcgcgagacctgaaaaaagagattccagagtttctacaagttcgcaggagtcaaaaaccacaaatgtcaggtaagagtctggtgtagacctgctgggggcagatggctctgtgtatgtgacatttatattagtttttatatctttcagtttgctgttctcagcaatttttagaaacaatgaagtgatcgtgagtagttttttgaataaaataatggataagatctaagtatgattatcttttatcacaaatttagtaaatcaaagttgaaagaaagtgcaatttcaaagcagttttgaatggaatatgtaaagggagtatcctcagttttttcattgaaatttttcaagtaaacattctttaaagatttggtgataattgccctaatttggctgtaatacattttgttgttcttttaaatagacagacttacgatgatggagctgcaacccgactaatgtcaacagtgaaacctttgagggagccagcaccctctgaagatgtgattgatattaagccagaaccagatgatctcattgacgaagacctcaactttgtgcaggagaatcccttatctcagaaaaaacctacagtgacacttacatatggttcttctcgcccttctattgaaatttatcgaccacctgcaagtagaaatgcagatagtggtgttcatttaaacaggttgcaatttcaacagcagcagaatagtattcatgctgccaagcagcttgatatgcagagtagttgggtatatgaaacaggacgtttgtgtgaaccagaggtgcttaacagcttagaagaaacgtatagtccgttctttagaaacaactcggagaaaatgagtatggaggtttgtatgtacttttaaattctggcttaggctaaaaatcggcagttcttgataccaaataatatatgaagtaactaaacacatattccaaggctgggcacagtggctcacacctgtaatcccaggactttgggaggccgaggcgggtggatcacgaggtcaggagattgagaccatcctggctaacacggtgaaaccccgtctctactaaaaatacaaaaaattagccaggcatggtggcaggcgcctgtagtcccagctactcgggaggctgaggcaggagaatggcgtgaacctgggaggcggagcttgcactgagccaagatcgtgccactgcactccagcctgggcaacagagcgagactccgtctcaaccaaaaaagaaaaaacaaaaaacaaaaaaaacacatattccaaatttattttattttattttactttttgagaaggagtttcactcttgttgcccaggctggagtgtgatggcgcgatctcaactcactgcaacctccacctcctgggttcaagcgattctcctgcttcagcctcccgagtagctggtattacccgccaccatgcctggctaattttttgtatttttagcaaagacagggtttcaccgtgttggccaggctggtcttgaaatcctggccctgtgatccacccaccttgatcttggctcactgcaacctgtgcttcccaggttcaagtgattcttctgattcagcctcctgaatagctgggattacaggtgtgtactaccacgaccagctaatttttgtatttttagtagagatggtgtttcaccatgttggaccaggctggtcttgaactcctgacctcaggtgatctgccctccttggcctcccaaagtgttgggattacaggcatgtaccatggcgcctggccccaagtttatttttaaattgttttatctgctgtttctcatgctataccagattttcttccccatggcttgctcctagagttcttttgtatcacatctgtatacctttttgggatttccagcatttgagatattaatcttaaattaatttggggggtttcaatcaattttagattgttcatggtaattgctagtgagcaaccaattaactctgttttattagtttcctcaatagcactatatgcagctgttgataaaataaatgtaaagttctaatttttgttttagctaaaggttgactgttagggataatatttatatttatagtatttatttatttatttattttgatacggtgtctcactctgtcgcccaggctggagtgcagtggcatgatcttggctccctacatcctccacctcccgggttcaagtgagtcttctgcctcagcctcccgagtagctcggactacaggcacatgccgccacgctcagctaatttttgtatttttatagagacagggtttcaccatattggccaggctggtctcgaaatcctgaccttgtgatccgcccacttcggccttccaaagtgctaggattacagatgtgagccaccacacccagcctcatatttatatttttacataaaaccaagaaatactctgtgaatttctcatattactgtgtactgtttttttcttaaaatggaaacattttgtggtagaactcttgttattttctgagattaggtaagcataaattttatctgattgcaggatgaaaactttcggaagagaaagttgcctgtggtaagttcagttgttaaagtaaaaaaattcaatcatgatggagaagaggaggaagaagatgatgattacgggtctcgaacaggaagcatctccagcagtgtgtctgtgcctgcaaagcctgaaaggaggtaccttgaacatggctgtaaattaatctttaactgccttggtggagtcttcctgatttattgaagagaataatcacgaaaataatttttgtttgttttttgagacggagtctcgctctgtcaaccaggctggagtgcagtgccacgatctcggctcactgcaacctctgcctcccaggttcaagtgattctcctgattgagcctcctgaatagctgggattataggtgtgcactaccatgaccagctaatttttgtatttttagtagagatggtgtttcaccatgttggaccaggctggtctcgaactcctgacctcaggtgatctgccctcctcagcttcccaaagtgttgggattacaggcatgagccaccgcacctgacataaatatttaatgtaataccgtgtaagacttttccattgggttttgagaaacacgttaatgagagaaattgcttaacattggagaggattgcagagaatattgactaatatggtggggtgaggaggaacaacatcaattaagattcagatttattatttaaaaaaactaaaaggggcctaggcatggtggctcatgcctgtacctagcactttgggaggctgaggcaggaggattgcttgagaccaggagttcgagaccagcctgggcgatgtaatgagtctttgtctcttaaaaaaaattaaaataaattagttggtcattgtggcaggcacctgtagtcctggactggagaggtggatgtggaagcattgcttgagcctagaagtttaaggctgcagtgacatcacactccatcctgggtgagagagtaagagtctgtctaaaaaaaaaaataaggttccagtgtagttggcattttctaaaaactgcagctagtctgtttaaaacctagagaaggttgtggtaaaggcataatagatggctggcctgtgaggaactgaaatttaaagtttaataaaaatacctttcttaactcttttagaccttctcttccaccttctaaacaagctaacaagaatctgattttgaaggctatatctgaagctcaagaatccgtaacaaaaacaactaactactctacaggtaatttaaatgtattatgtttacacttggtaagacatttctgtaattcttgagtaaggtgaaaatgattgctccttaaattgtaaaataaaggtgcctgtcagatgtcaagaccaagatgaggttcccatatagaaaaatggctttaaaaggaaattgacaagtttgagaaacttcgccaactgttattggactgtagtttttcaagcaccatataatgccttttatatctttccaatgtgtgtaaaatatatagtacgtaaatattttgaagagaattttgatgaagtaggactttcatattagtagcattagattcaacattagatatgaatttacgatgtgtaaaggggagtacaattggacaatgataggtatctgaagttatagaaatttgttaaacagtagtatataaacaaggttggtttcttcccttttggcggaactcattagtagaatataaggcagagaattgactcatttgtgatgttcctgctccaattctagtggaagtactgaataattttatgagagaatataaaagtattacgttttcaaaacaggagatgaatcagctgtaagctggtcttacggaaagctgattctgaaatgcaaacaactgatgggtgtcattttgtgttgtcaaattctgtactctctggccgacctgttgtagccaatgtgtaaacttgtgttaagaagctgatggtaatgagctactctaaaaagatttaagttttgctgtggatttggtgggtgtacttacagcattgccctgcttatccactctctcgcttttttttgtgaccccccttcctaaaatgaggtaaactgtagccatcagtttttttatttgttttctttttttgaggcgaagtcttgctctgttgcccaggctggagtgcagtggtgtgatcttggcttactgcaatctctgcctcctgggtccaagcgattctcctgcctcagcctcccaagtagctgggattacaggcgcccactaccatgccaggctaatttttttgtatttttagtagaggcggggttccaccatgttggccaggctggtctcgtactcctgacctcaggtgatcacctgcctcctcggcctcccaaaatgctgggattacaagcgtgagccaccgcgcctggcaccatcagtttttgatcctgatacttgtctgtcctcttggttctcctcatccctaatttaaccttgaacacaaaattcaacaggttttggcatatagaataaagattatcaggcaaaggcgcactcttgacctaatgatatatctacatttcatttcctgatctatcagcaatattaattgtctagaatgatgagaagtttagagaagttccatgactttgaaattttctttctttacctaggttatctaaattacaatttgaaactcatataagatcatgaagctaagcttaaataaaccgcattttgttgaaaatgaatacatatgtactatattgtattcatggtatgtggttgtatggatattgtttacatatgtttggataaataggttcaggtatctatctcagtaacgtaagaaaaaatgaatggtatctatggattgaactcctcatatatatgttcttttcttttctttttcttttttttttggagacagagtctcactctgttgcccaggctggagtgcacagtggtgcaatctcggctcactgcaacctccgccttccgggtttaagcaattctcctgcctcagcctcctgagtagttgggattacaggtgtgtgccactatgcccggctagtgtttgtatttttagtagaaacgaggttttaccatgttggccaggctggtctcaaactcctgacctcaagtgatccacccaccttgcctcccaaagtgctgagattacaggcatgagccactgcgcccagcctgaactcatatgtcctaaaccaaaggaggcatttatatttaatatgacatagtcactgtggagttttgacgtattactgcatttgtatttctatcttttttgcttttatgtgaaagttccacagaaacagacacttccagttgctcccagaactcgaacttctcaagaagaattgctagcagaagtggtccagggacaaagtaggacccccagaataagtccccccattaaagaagaggaaacaaaaggagattctgtagaaaaaaatcaaggtaataacttaaatgatgtttcactctttactacagttttttcatgaggcattgaatattttccaatggatttttatgaaatattacactatgaaaaaagtgatgattaagcccagaaatagaatgagaagaataccatgaggaaggttcataccaacacttcagaaaaaaattttttttttaaagaggtagggtcttgctgtgttgcccaggcagtcctcaaactcctgggctcaagcagtcctcctgcctcagcatccttagtagctggaggtgtgtacaagtgtgtgccactgcacccagccctttctagaaatttttgaaagtctttttattgtggaaatttttaatattctcaaaaatggaaaggctagtacagtgaactctcatgaacccagtcattaagccttagttattatcagaattttgctggtctttagatagctccttcttaaagatatatttatttctgcattctttctttttctctttttgttgatcctgcccgtttacctgaacttgaaattttagttacctttaaatctcccgtctcttaagcatcctgtctctgacctcccatatgtgtcccagcaaccctaatttatcccctcgtgcctaacatacttcagtttgcttccaggttttttttttttttttttttttttgcttttttctcagctttctcccccaattcctatacaatcttttgactttgaaagtgtgtctctcatcttctgactcctttgtgaaagtatctctcccctcctcctcattacccagaactaacgctattagtttggacttttggtgtctgttatctgacccctgggcctgcacagcccttctccatgactcttcagaccttttgtctcttttgtcgtcaagaaggattcttttttcttctgtttctttttctactaagatttgaattttaagaccccaccaaaaaaatctatatgcttattatgttatttctcacatacttttcaagaaccttggaatatattttttcatttcttcaaaactgtcctttaaattgttccaggtttcatgaaaccttatgatttcagaattgtcaattctgtatttgtttcctcattgtgtctctttaaaaatttttgactgtattgttcagtttgccatgacagcgttatatactattctgataattgataggcctgaggacaagacctgtttggtccccaaacagcagataggtaccaattggaaaatgtgaatgggccaaattgagaagaggagctgaaactgaggagggattttgctcagtgcagtggcagatgaggctgatctaaaaggactgcagtggtctactccctgtggagtctgtagtgtgttgcaccaaggttttcttcaaacacaggactctacgtgagagtcttggagtggaatcagatggagcagggaaacagacaatagagaaaaggaaagaatgtcagataaaaataggagaggaaaacaataggaaatctcaaagcaaggtgccatattttttaacatcacaaaatcaacagaagaaggttgttgattctgaagttagaatagctatccaaagcaaactttcccctaaaatgaacaacagaaaagtatcaaggtcaagtcctgtgccgaattaaaagataaaagggaataaaagacaaaacagcattgtttcaatgaaagcatgctgaaaggtataccaaaaagaaatacaatttcaaagtgagctagaagacattatttaaataatacaagacaaagccaagaaaaacataaaacagaagaactttgaggctgggtgcagtggctcatgcctgtaatcccaacactttgggaggctgaggcaggaggatcacttgagactagcctgggcagcatagcaaaaccctgtctcgacaaaaaataaaaatattagctgggcaaggtatacacctgtagtcctgtctccttgggaggctgaagtgggaggattgctggagcccgggaggctgaggtgggaggattgctggagcccaggaggctgaggttgcagtgagccacgatcataccattgccctccagggaggctgaggtgggaggattgctggagcccaggaggctgaggttgcagtgagccatgatcatgccattgccatctagtttgggcgatagagtgagactgtgtctcaaaataaatgaagactaaattagaaagaactcgaaagaattagtgcgtcttaataaaataaaacatgcgtgtaatcccagcaatttgggaggccaaggcgggaggatcacttgaggccaggagttgaagatcagccagggcaacatagcaaaaccttatggctacagaaaacagcaatttaaaaataaataaaattaaaacatcttcagagaaattgaagataaaagacaagaacattttaaaagtctaaaagggctcatgagaaagtggcaaatattgataataggcaatagaaatacagtgtttttatagtaggaatctccaaagaaacaatattcagaggaacagagcaaacattaactgtctttcaagaaaactttcatgaagtgaaaacatgtttgaaactgttgtctgaaaaattgtacagtatacctgagaatatttacccagaaccataacactaagatgtattatataattaatgaaattttaaaaagaaaaaaaatgatttggacattcaggcaaaaggggcacatgacttagaagaaaaggaaaggtagattatcatcaaacttttcaacagcatcacttttgtgctggaagaaaatggactagcatatttaagatactccagaaaagaaaatgtgagccaagaatttaatgtccagcaaaagtgacctttagaagtgatccagcaccaactgttatctatatgcagaaattcagagactcattcccatgaacttttcttaggaaatctaatggaggatgagcttcagacaagtaaaagcctgttgtcctgaatttacattggaaatgtttcggaactcacagtgtattttatatataaatacatttttttctagttctgtctactagaaggcatagaaacattcatcaacccttagcatcatctgtagttcccagattgtggtcttggaatacttcctatttaaaaaactaggcttcttgggctgggtgcagttgctcacgcctgtaatcccagcactttgggaagccgaggtgggcagatcacctgaggtcaggagttcaaaagcagcctggccagtgtggtgaaaccccatctctactaaaaatacaaaaaaattagctgggtgttgtggtgtgcgcctgtagtcctagctactcgggaggctgagccaggagaatcgcttggatccgggaggcggaggttgcagtgagccaagattgtgccaccgtactccagcctgggcaacagagtgagattccgtctcaagaaaaaataaaaataaaaaaacaaagaactaggcttcttgagaaatgtctttttccaggtctggggcaggaaatgttaacatgatcctggaatggctcaacatcccagatagcaaagaagctgtcaatgaatggtagaccacgtccaaaggatgcaggcgccaacttagaggtttccattggccaaaaatggaattatttgagattcagtaggtgtaaatatcgcggtgaattaaagcccatttaaatccacaatttcataatgacattttaaaaaaataagctctaactagtcaccttctggaaggtagtagataatcattcattgtcttgaaaactgggtaaataaaataattgaacatttatgctgtcttttctgtgagaacgataccactgggtaaccccataggacaggagttggcatctgttggaaccaaaccgtgcctattcatgtatgtattgtccgtggctactttcatactacagccttagttgaatagttgcaacagaccatatagcttgcatagcctaaaatagcctaaaagatttgccaacctctgatatagtagatgagagaaacattttcttttaaaatgatttcagctgataagagaacaagatggtaggattagagttatgcttttaagagtgaaaaccagttgttttgtgcctcttgatacaaaagaacagaacttttgtcttgccaaaaatgtaaacctaagtcatcaagctcccagtccagcagtcagtttgcaagaagttgcagaggccagaggagtatgttggttgagcttcaccatgagtgtgcagccggaaaaatagtgtttgggacactgtgggttgaatagcctgagaaattgagattaaaaggcaaatcaaaggaaaataaaaggagcaggattaaattgtagtggctagggatacccagtgtgtgtgaaattataaagaacctctaggcgttaatataaaaagcacatagtggttgcttttgaagaggaccgataaagatggagcacacagagaggcttctggggtggcagatgacgttctctcttttgacttggatggtagtcagaagggtgttttgccttacaaaaattcattaagctatatgtttgtgtggttttctatactgtgttttaaaaggggataattgaaatggtgtcaggtacctttgctgatgaggagtttggtattactagatatattcacaagtgtgaagtgatactgcaagcaactgttatctgttaatgtggttactcactgttgtacggtataatctggggcaggtttttaaaatataaacatgcactcgtattggcataagttgttaattttttttcttcttttgtttgagcagatagcattctctcatttctctggtgtctttatttttactagcgcacccacctcataatatgtgtactttttgctttttgtcttgccatcagtctgtcactagaagtttattttgccgatcttttcaaagacttaacaacattattctggctttattgatttttttttttttttggtgtttttgttttctatttcattgacttgtgctttttttttattttttttttttaagaggcgaggtctcactgtcacctaggctagagtacagtggcacaattgtagctcactgcaacctcaaatgcctgggctcaaatgatcctcccacctcagggaccataggcacacgccaccacgcccagctaatgtttaagtttttttgtaaagatggagtctcactatgttgcccaggctggtctggaactcctgagctcaagcagccctcttgcctcagcctcccaaagtgctaggtttacaggtgtgagccactgcacctggcccgacttctcttttaatttatccttccatattttaaaaattatttacctcaggctgtcttcttctcaaatgtaagcatttgagaagaatacatatgacaggttttaattcatcatgttttcattatcagagtgtctttaatttccattataattttcatcattgaaagtgtgttttctatacagtatttggaagtggtatgtgtttttgtcttttaatcctttttattatagacacctgacttaattgcattgtggttagataatgtaatttttacaatgcatagtttttgaaaattgttaacacttgcttagtgcataatcaagtttatgcatcttccacatgcattttggaagaaagtggactaattattggatggggaattttacatttattcagtagataaagctctactgttaacattattcaaatcttgaccttgctgagtttttgtgctgcttgacttaccacttgagaaagggtgttgaaattgcccaacatgatgacagatttatcttaatttctcttgtacttatatcaagtttttgctttatttttaggctgttatatactattaggtgcatacatatttaaatttgttatatcttctctgcaaattgaatcccttatcttgatttatgaccctctgcaaaaaagatgtttttatctcaaagtcagttttgcctgatattaatatagccatttaattatatttgctttatatatctggtttccctgcctttgttttcagttttctctctcatgctttaggtatatacagttgacccttgaaccagacaagtttgaactgtgtgggtccactcatacacttatatgtggatttttgaaaataaatatattggaaatattttttgagatgtggcaatttgaaaaaacttgtagataaactatatagcctagaaatagtgacaaaattaagaaaaatttaggtatgtcatgaacacataaaatatatgtagctactagactaacatttactatcttaaaacatacacatctattatgaagtttaatttatcaaaatatatgcacacaaacacagactttacatgataccgcttgtagttgagagaaatgtaagcaaacataaagatgcagtaatagctacataagatttactatagtacatactgtactactgtaataattttgtagttacctcctgttgctttatggtaagctaaggtgttttgagtgtccacttaaaatgctgtgtgatgcaaccatctctgcgacagttcagctctccagtaaattgtgaattgcagtgaaaggtgatctcgcagttcttgcatatttttcatcatgtttagtgcaatactgtaaaccttgaataacaccaggggacccataatgtgctactggtgatgctggacatgctcccaagaagtagagaaaagtcatgacattacaagaaaccattgctcagtatgtaccaaagatacatgttacaactgtggctgcagttattcaccatttctggataaatgaatttaacataagaaccatggttaaaaaaaaaagaaaaagaaaaaaatgtatgaagctgccactgcagctacgttggcaacagtaagtagttaaatgtttgggaagtcaaaagttgtatgtgggttttcaactgttgttgggggattggttcccttagccctcatattgtttaagggtcaactatatattatatcttaaatattataaagctggattttgttttttaatctcatctgagtttgccttttattggagagtttagaccagtcacatttattacaattactggtatagttggattactttctgtcatcattgctgatttgcatttgcctgcttttctgttttttctcatgttttttaaggttcattaattactgttattgttgacaaccctaaccctggttctacaattttaaactagtttactgtttaaaccttccctttctgttctttttttttttttttgagacggagtctcactttgttgccaggctggagtgtagtagcgcgatctcggctcaccgcaacctccgactccttggttcaagtgattctcctgcctcagcctcccaagtagctgggattatagacgcccaccactacgcccagctaatttttgtatttttaatagagacgaggtttcaccatattggccaggatggtctcaatctcttgatctctgatcccctgaccttgttatctgcccgcttcagcctcccaaagtgttgggattataggtgtgagccaccatgcttggcctcatttctgttcttttagtcgttaccagtgaaattttaccacacaaatttaatttagtattctaaaagttaatatcctgaccccactctcaaacagtaaaaggacttttgaatacctatgaagagcttcagtctttatcctcctcatttacttgtttccagtgtttcaatttgatcttttttaaaatgcacaagttgggccgggtgcggtggctcatgcctgtaatcccagcactttgggaggctgaggcgggtggatcacctgaggtcaggagttcgagaccagcctgaccatatggtgaaaccctgtctctactaaaaatagaaaaattagccaggcatggtggcacacacctgtagtcccagctactcaggaggctgaggcagaagaatcgcttgaacccaggaggcagaggttgcagtgggctgagattgcgccgctgcactccagcctgagcgacaaagcgacactccttatcaaaaaaaataagtaaaataaaatacacaagttggacaacatttttgtaattttttccaggcaatgttttttgaggtttacctcctgtttatcattttacttattcttaacatctctgagtgttatttggggatcattattttccaatattttgaagtatttttgaagtatttttttggaagtttcactgaaacatgtctgttggcaatatattttccaagagtctattcacctgtgagtgttttctttctttgtgttcttgtgcagtagttttgctggatacccaaatctaggttgttagttatttgctctccacaccttatatatattattatcccactgtcttctgctttccattgttgagtggacttctatcattctaattgtctgtcgttcctttgtaggtgatctgtcctttctctctggctgctttcaagatcttctctttgtgtttgatgttctgcagtttcactacgatgtgtctaggcgtggatttccttttatttttcctgtttggtataatgtatggaagcatcccatatatttgaaataaaatgcattatgaaatacatgctcaccatagaaaatctggaaaaagaaagcatatcaatgtaatatctcctgatagatgagaaaataatcaaatagtataaaaaagattaaaaataaaaagcaacattccttacttcattcttctctatactagtcccactccgcagaatcccccacttttaaatgcttctgtttctttctccgtgttgtaataatatgctttatactgtttcttcattgaccaactagatagtacctgttgatttcttgctgtatgtcaggttctagcccatttatacttttcccttgcttccaagctcatacagcaaaatcaatttttaattcatttattggttactttagtaattttaagtagtaacttaaatatttcttgtctggttatatttcagtatattttgacttctgaaagatatgtatccttcaattcctttttttttttggaggtagagtctcacttttgtcacccaggctggagtgcagtggcgtaatcctggctcactgcaacctctgcctcctgggtttaagtgattctcctgcctcagcctccttagtagcttgggactacaggcacaccctgccacacctggaatttttaataaaatttttagtagagacagggtctcaccatcatgcccaggctggtctcaaactcctgagctcaggcagtctgcccaccttgtcctcccaaagtgctgggattacaggcataagccaccatgccaggcctctctttcaagtcttatattttctttcttgccgccacctacattctgtcctgcctccaccttctaaattgtcacctgttcttttatattgtcaaagctgatcaaatttacattttgttccctactttagttaagacttagtcgattgactctaagttgagaaacagtaagcatttacactgttaagactatttagtctgggcatggttggtggctcacacctgtaatcccagcactttaggaggctgaggtgggagatttgcttgagcctaggaatttgaggccagcgtgggcaacatagcgagaccctcatctatatatatattttaatgttttttaattagctgggtgtgatgatgtgcacctatagtcatggctactctggagaattgcttgagcccaggagttcgaggttacagtgagctgtgattgtgccagcctgggtgacagaccaagaccctgtctctaaaaataaaaaaaaaattttaaagactatataaatattacaaggccaaatttacattctgtttcttgtacagttttgtgtgggaactctctagagtttttttaatttttcccccttttttgtttcccttaggttcttcttttttcccttctttcattgcctacctgtactgtagcctaaaagtcttatcactctgtgctttgaaatctttgggtttcccactttttcttaggtaccttcctcctggagcctctctcctccttttctgacctcactgcttgctctaggcctgctcaaggccatcatcccgaggcgccctcctcccctgagtcggctctgcaattcctgaattccattttgtcttctcagtgcatttctccgttttgtaatcacgtcacaaagaaactccttaagaaagtatagaaggtaaattttctgagttcttggaaatctgaagctatccttgtacttgtttgatactttgactaggtacagaattataggttgaagtcattttcttcagaactttgaaggcatagtttcattatcttgaggcttcagtgttgatgctgagaacttggttgcccatcttattccattgtgtaatacctgggatttttttctccgggaacttttttttttctatgttcctggtgtctgaaatttcactgtggtatgtctagatgctagttaggtacattaggtacccttttaatttgaaaattcattctcttccgtgtgggaaatactcttgcattatttgttttaaaatttgctgtccttgttttcattgttctctggtggaaattctgttagttggatgataagcccttactttaatctgtcagttgtatattttttctctcttgatttttgacttgatcttgttggtctactcttgaatacttgcttgacttgatctttagtctccttactgaacattttaaaaatgtaggcaagcatattttttaatttccacaaactttttcttgttctatttttcatagtatcttactttgtggatacagaatcatctcaactgtctgaagatcctaattaaagggattttttttttcttttcaaggaattcactcttgtcttctaattaatggagtcagagtcagattttatgctttttttcttgctctttcgattatggaatttttttcaaaaacatctgcagatagtggttcctagtttaaggaaaggtagtgcagaggcttacctagaattgtgctgtgggctgagcttttctgcaggcaggtttagctttcaatgaagcagacaaggagctgcaattggccttgcagttgtagaggaatttcttgggggagcaggttggtatgcttacactcctactggttgtctattaaaaatattaaaattttgtcttttaaatgtctgtctctggcagtaccattcacaagccttcttctctgccttacatccttcttggtttttactcattgctgcaatctctcacagttggatggccctttgtttcatccaaattcaaggcttgatatatcatctctgcactgtgactctcacatttttatatctccagcctggaccttgccctgaattcctcatttctgtccaaccactttatatttcttcttggaggtgtaataaatcatttcaaacttgtccaaagctcaactatgaattttcctctcctgtctgttcttcctgtagtcttcctcattttagtttattggtgacttcacctttccagtttctgagacagaatcctgttgccattctttttttctctccttctcctttccttcctcttccctctctacctctgtctccctccttcccttgttccacctgtcagcctctacctccagatttatagaattcactaccgtttatcacttctgcctctaccacccatcaaagtcactgtctggccgggtgcggtggctcatgcctgtaatcccagcactttgggaggccgaggcgggtggatcatatgaggctaggagttcgagacctgcctggccggcatagtgaaaccccgtctctactaaaaatacaaatattagctgggcatgatggcacatgcctgtagtcccagctactcaggaggctgaggtacgagaattggttgaacctgggaggcggaggttacggtgagccgagatcatgccactgcactctagccttggtgacacagtgacactctgtctccaaaaaaaaaaaggcaaaaaaaagtcaccgtctgtgatttgccttggttacttgattattggaatagtgtgttcttacaaggtgtgcctgctttcaaacttgccttccttcagtccatcccacacagcagcagcagtgatcctttacactgtaaattagatcatgctactttgcagcttagaaccccccaggggctccctgtcacactgtaagtcacagtgttctgccttctcatcacccacctgcctccctctgctctggctccccgtgcttgctgctgctcctgcacactggcctgcttgtccttcaggacgttggaagagctgcgcgtctcagatgcttttgccctctcctgagaatgtttactttggatgttctcatatctcatccatgtgtcatctttgaggccttctctggccccatccccacactccctcttttctgaagctttatttttccccataacgtttgtcaccatcaaatacatattttatgtttttgtagtttaggtatttttatccgaacgtaggtctttatgttttaacgtgaattgttttcttttagcatgtatttttttgggggtcttgagagctacctccttccccgtctcaacagagtctgtcctttttgagcagggatttatgtgtttgttctgtatggctgttactgagtgcccagagcagtgtctggcatatagtagcaggagctcagtcagtgtttgttgtctgagtaaatgtcactcctgccttgcatctaacctgcagttttcacaggggctcatttgtggttttgcctgctgtgccttacagccagtatttgtccatatattttctattacccagagattgttgacatctcatctgctgcaccttgtaacccccatctctaaaccagtgatctccatcatatttttgacctgaaaatttttgtacagtagccatttttaagtatgtataccaatatatgtattttacttacgtacacatgctgtattgatatgaatattagaaaacataagaatagaaatctgccgggcttggtggctcacgcctgtaatcccagcaatttgagaggctgagacgggcagatcattaggtcaggagttcgagaccagcctggccaacatggtgaaccgccgtctctactaaaaatacaaaaattagccgggtgtggtgatgggtgcctgtaatcccagctacttgggaagctgaggcaggagaattgcttgaacctgggaggcggaggttgcagtgagccaagattgcgccactccactgtagcctgagcgacagggtgagactccatctcggaaaataaaataaaaaaagaacagaaacccaaagatcatagggtagagatgtagatattaagttctttaattcacttttatggactcttcagaaggagagattataattgtatatgcttgatacattgtgttggactggaagcactgtgaaagattcttagtcaaggggagattttacattcaaagaaaatggaaaatccccctgctttgctcggagggaagaactgcacttaaaagtttgatgtgtattggtgtcgtcttctaggcatttcttatatctgtgaacatgtgcaccctttgtatataaagtggaattacatgtttacttacgcacacacacacatgtacatataaagcaggaattatactacccagagttctctgtgacatttttgttccacttaatgtatcatgggagagtccttgagtgtggacctaggagccagactaccgaaggtgcagaccctgcagtttactagttgatttaacctttctgtaccctagtttcctaatctataaatgaagaataacggtagcatttacttcagagttcttggtaggagtaaatgttaaaatacataagctttctctgctgatgaatatttacactggagtcttaggaagggtccttgcttattttctattctaaagttgggctggacatagtgggccatatgggtgccatcagatgggctcttgtttctctgtgacccgttctgttagacctctttcctgcttttttccttgaggttgtttatctgtcctctagtgaaccagctggtttgcaggtggtgcttttctgagagtgtcttgctgttaacagttactatggatgtcatatgccagctggttctgttaaaaaaaagtctgtgaatccaaagccttgaattttgaacattattttctgtctggaattttgaagaactgattcataaagtggagaaatgaataaagatttttattttacaaattccagcacttagcattttctttattctgttactgtgacatctatttgggaaaccaaagactaccattctttataaggattcctttttttttttttttttttttttttttgagacagattctcactctgtcacccaggctgcagtgcagtggcgcagtctcactcaccgcagcctctgccttcccaggttcaggtgattctcatgcctcagcctcccgagtagctggaattacaggcatatgccaccacgcctggctaatttttgtatttttagtggagacagggttttgccatgttggccaggctggtcttgaactcctgacctcaagtgatccacctgccttggcctcccaaagtgctggaatgacaggtgtgggcctctgtgccaggccaggattcttcttttaagagactatagtgagcagcatctaccaacttgcatccttgtatgttgcatatcttatttgtttgcttggggagtaaaccaaagtaaaaacgtcctttgtcaaattaaggaccttacaagattttctgtgttaatggattggaagtctttactattctttttttttttttttgagatggagtctccctctgtcgcctaggctggagtgcagtggcacgatctctgcttattcagtctctgcctcccgggttcaagcgattctcctgcctcagcctcctgagtagctgggataacaggcgtgcgccaccacacctggctgatttttgtatttttagcagagacgggatttcgccacattggtcaggctggtctcgaactcctgacctcataatccacccaccttggcctcccaaaatgctgggattacaggcatgagtcaccacgcccagcctagatgtctttactattcttaagatggcagtagtccccaagttgatctatggattcaactcaatccctgtttaaaccccaaattgcttttttttgtagaaatcggcaggctgatcctaaaattcatatggaaataaaaagggactgagaatagccaaaactattgaaaaagagtaacgttggcaaggttatgttgcttgatttcaaaacttactacaaagctagagtaatgaagactgtgtggtactggcataaggatgaccatacagacccgtggaccggaattgagaatccagaaataaatgcatactttcacaacccatcaatttttggcagcggtgttaagacagtttattggcaaaagaataggtttttccacaggtgatgctgggacaactgaatatccacatgaaaagaatgaagttggaaccttatcttatgtcataaacaaaaataactcaaaatggatcaaaaacctaaacttcaaaactcttagggaaaaaaatagatatgtcttggattccagaatgatttcttaaatatgacaccaaaagcacaagcaaccaaaggaaaaaagataactcggacttcatcaaaatttagtatttttgtgtttcaaaagatactatcaaaaaaaaaaaagacaacaaaatgggagagaatatttaagaaacacctgtctaataatggtctagtattaagccaaggctgagttcttatttccccatccttaagtttacacgatactatattagtgaagttgaattctgtcattaccacatgtatcttgaaagaagtttgtgtggatcacgggtccagttactttctccgccctttccctccagaggatttgtcactctcaataatgttatatactaatttcaaggggaaatacaactcaaaacaaatcagaaatctgaagcttaaaaatgttatggtttagatgatgaaaagggaaaagtacatttaattcatatcatatttagatgtaaagcacttaatgttatattgcttaacctataaagtagcgcttcagtgctctcatcatatgaagtaaataatagaaaattctttgtgtgacacatgtctgttttcagccaatcagaaaccaggattattttgtatgtaataatagggtttactggaagaggagctatacagatggtacttagaggatgtagggccctacgtattagggcttcttagttgtagcgaagagcaattggtctggtacgtttagctttttcacatttagttttgaattctgactctagaaatgtacaaccccatcttttgaattacaggttttaagatgttatttgctcttaatacgtcttaaggtaacagccttgatcactgcttttactttcgatgaaataacttaatgagctgtgaagaaaaaattatcagattttaagggagagaattttatgaaaatgtctttgaggttcctgtcacctttatgagaatgtcttcaaagtttccatcaccacctctaccaatttttcttccaccggagccagtggacttaggttccataacaagctcctcttgttcactgaatgagctagacaatatttcccaccttttaaggaaaatatcagctgatatcaatgaaattaaaggaatgaaagcagctattttgacagtggaagcaaatctttttgatctaaatgttagagtgtccaagaatgaagcaaaaatttcatctttggaggttaaaatgaatgaatattcaacaacatatgaatgcaacagacagtttgaagatcaagaagaagatactgaatcacagtcaagaactactgatgtaaaaataatcggcttccttagaaacgttgagaaaggtaaactcttaatatatgatatgttctaggtacccatcctttgatctgtatctttccacgtatgttgactgtagctctgatgtggagggagcaagttacagagaacttgaatttttcatggacctttaatgacaaatttggattctgcttgatttagcttagcaatctagaattgatcagaattccatcctctttaatggagctctctaaaacgatgttttgaaaagacagatgaacctagagcaatgaagcaaaacttgaaatgtggaagtgtggtctttcatgtgtcttgtgaaattattttaaaatgtctcattctttcatcatgtactgttgatgtgaaggagacctgttgcagtatttggatggaaagagcattcttcctgtaacttttcacctcagttttccaagcttcccacaggaatgcaacttgacctaagtgtcatcttcgttacagttcctcagaatgtgtgtttttttatggtaataattctggaaggaattgacttttttgggacgcaccagtaaaatttcatataacttatgttttaaaggaaactaactgatacaatttcaaatcgagtataggttttaaaatttaaaaacaccttttaatgaaatgtggtgcttggtgggagatggcccacttaacatctttgcactgagtaagcaaagcctgtccttgtgaagccacctgtaatggatatacccaaaatcagcatgtgggcatcttagtaagatttcagtatttgcaaccctatcagttacatccctttgtacactgtagtgcagtaccttataatgagcaagtgagtgcctgatgtctgctaagcgctgtgggggctacagaaaagtgtgacattctcccatcctcaaggagcttaacatcaaatcgaggatggaaaaaaatcagttctttgtccctattttgtgcagtcagactgctgggcatattattgttaggaatagtgaacctaataggaattaatgttaggagcctattttagaagaaataagtagttgaacatcttttcttgtggaagaggcaaagaattattatcatgctttgctaacatagggtgtggattgtagagctgagtgtcttattgttttctttgcatgcatcgaagcccagagtttgtcttttaggaactcttgtttagatgatgagagtgttttgttttgctatttcgattatcttcaaaggtcatgagtgagtcgtgatggtaagagctcaggtgatggagggaggtgcttgccatgcttattgtgcagttggctgtgatgcgagctgctgggccacaaggtgccttttcctggattttccacccgtttgccacctttactttccccgcagaattcaaattcaggaaaactgatgtcctcatagagggagaaccaggagtgttttaaattggcatttgtggtttaaccctgagtacagccttttttgtcttacaggatatgtctttggtctataaatactattaaattgaattgttgaagctttaagttacttttaagacttcaagttaagaacccagaaggattgatttttgggaaccacatgctggtattgtctgtgttgtaagcttagtgaagttttaaaatttatattctaggaactcaacagaggcaattattatcccgactgcaaatcgacccagtaatggcagaaactctgcagatgagtcaaggttggtaatgtttcaagttgtactgtaatccagccatttcagttgccatttccatttcttacaccccatttaacgtatctcggatctcttagatcctgccctaagatgttatatttagatctgtgaaaatattttagggccaggagataagatctgcatttctttcatgttatatagtgttataattttttgcctcattggaaaactttgttcctttcacaccattccaagtgtgtccctagcactgtcggctgtcactctcctgctgtcaggagtgacctgcgtttctgatttaccctcccactctacccagcttttgtcattgccatgagtggcttttgtatcctgtttttcacctggttagccttatcctcttgtacttcattttggagtcttatcaccagggccacacctggaacttgttgttctagtgttctagagccactctagtttgcctgtctcctttcctctccccacagacacacatgccaggggctactccaggactggagctgacgccttcatttttattatctctgtcctcagtgcccagcccctgccagatgcatgttcaatgtcttaaaaatgactgcaggataaacacaggcaaccatgagagacccggaatcatctcagtccttctgtttcccctaagtctgtcttttgtgggaagctctggtccctagacccctctcagtcaggactccacagtcagtcactctgttccccgaccctcccccagctttccagctcagaaagtgtgcttttcctccctaagggtcagcctccaccagaggccagatcccactgggttggtgagccactggcatgtcacccactcctccaacttcattctctgcctcctgtcttctctctgtagaggtgttcagacattctctgcccgtgattttgctctctcatctcccagcagtccgtcctgcttcctccacaggagtatttgaaaaggttgacagccgagatctgtgtgtgggatccacttcatcagctcttgtgcatgttttctcttctgcctccttcagcttttcattgtacccatggtgcacgcagtttgaaatagcaagtagttctgtgaggcttatgaatgactgcagtccttagctcctatcacattttttattctaagatccctttgtttctgcatattctattaattttctaaaaacatactgattttgtgtacacaatactctttgttatttctctgtggtctgaaaggtggttttgacatttttcccctccctgcttcgtcttgttttctctaagtggtctgttttggctgtcttttatgctggaggttcccctctgatgtctggggatcctaggtggtcttacatttaagagtggagcactcagaaggtcactggtattctgggttcatgagttggggcatggggcactttgactttctgtttgaaactagaccctgtggtggaaagtgatttgtcctgcctgtctggtttgtgggcaccctgatgtcactgccttcaagactttcctctcaggctggtcagcttctccaaaacaaagtttttcaagtaatagcctggtagtcagagttctgcgagcttaagtggggaaagaaggctgggggaggcacctcaccattaattattatgtaatgtttatttaaccctcccccaaccattgtcagtccagtacttctttcatcatggctggtgtctcttggtccagggactctgttcttatcctctgaagagtctaaagctccactttctccaagggagaatgcatgcagtgggtaaagatttatcaggaaatctaattgcctttaaaaatttttaacagtgtaccttcaggtgattttgtcgtagcatctttctggcagagaccctaatgcttcatccataggcctctccgaagattatctacaggaaagcacatcaccagtcatcccaggtgtcttcagtgtagaggtcgggattggtgtggcaagcatcaaaaccaagaaaacagtggccaggtgcagtggctcacgcccataatcccagcacttggggaagccaaggcaggcagatcacttcaggtcaggagttccagaccagcctggccaacatggcgaaacccaatctctactaaaaaatacaaaaattagccaggcgtggtggtgcacatctgtaatcccagctactaaggaggctgaggcaggagccttgcttgaacccaggaggcggaggttgcagtgagctgagctcgcaccactgcactccagcctgggtgacagagcaagactgtctcaaacaaagaaaacagatacatggaattagagttgaagaagaactaactgcttcttggacacatctaatacacctcttttttgcctgccatttcttccatttcttcctaaggtccttttactgccagttcctgagcctttggagaatcttgtggtctgaattggattgcttcattattgccttagaattcagcttttacagatcccctgagttcttaatcatctgttttccactttgaaaatttctttttacacttattttctttgtgagtttatgctttcaaaacaaaaacaaaacccttattgacatttctgtgggctttcaggagggaacaaaaagtaaatgcatggggtcagcctgtggtctctactcagaagatgttacttactcccccgtctgtctggtctccatgtgacctgggctgctaacgttccgcttgcagagaggtgtgcgggagggaccggtgcacgctttcctcaaccctggagcatgttacacttgggttcccatactttctccaagctttgacctttcggcttccagttcactctgtctttattcttctcattccctttcattctcatgtgtcagcgcatctcctccattcctcctcaaaaggttagctttgctctctcccaccttcagcattattttcatctcttctgtgttcacccaacctatgaactggtagaactccttcgtctcagaaagtgcagagtggtgggaaggagtgaagcagcccctgggccactgttgggacccacctttgacagttgtgagacctcggtgaatcatttaataacttggagctgcaaacagtcatctgtaacatgggaggaaaccgactttgtaggctttgagtgaggattcagtgagagacggccaccctgaatatgttaaacacttctgtcaccttcggttttgactcagcatcttatttctgtccccccacctacaggtcaaatctgaattttctacttcctcttaaacatgggagagtcccacaaagactttaaatctaacatggaaatgtatctttgccccttttaactttgctctttttcttttgctaagtttctcatcccagctttctcttccgcctgtctccctttaccatctgtactgcccttgctggggaaggcgggcacgccccttcccaggatggagcatgtcttctcttcctgtcaggtgtgtgagaccaggacagacagcagagaatcttttcattcagagcctcaccctctgtcccgggcaacagcaggtcgagaactctggttcttccttaacactgtttttctaaaaaccagtttgatcaggccacttccttccttaggaacctctcttgatttcttttctcttttttttttttttggtttgagatggagtctccctctgtcactcgtgctggagtgcagtggcacaatcctgctcattgcagccttgacctcctgggcccaagcacttctcccacctcagcctcccaagtagctgggactgcgggcatgtgctcccacgcctggctaattttatttatttatttattttctggttgatgggaggtctcactatgttgcctaggccggtctcaaactcctgggcttatggaatccttgtgccttggcctcccagaatgttgggattacagacatgaaccgccacaccaggccacttgatttcttactaattatagaccagaatcgagagtcactgagacatagaagaacctttattatatgtgtcagccttccttggtatgtactgctgagcccaccacacacacccttccagccattccacattctaacctttctcagatgccttcggccttgtgaaagcccctttccttctacgtgcgttttcctctgcctgaagtgctgtgttcgtttctccgagtctctctccttgtttattcctgcttgttcctttactgctgacttcagatgttcctccttgctaagcttttcgttggttcttggctggagtgggctgttctgtattctcagcaccttgttcacatcccttttgggtcatgctattctgaaattgtatatgtgtctgtttttctttttttctttgtgtatctagctcagttctcttagttgttcagtaaatactcagtgaatgaacataaatgaataccctgtaaattttggtctctaagctttaaaagaagtgtattaacttcagtccgttgatggcgtattgataggtcagccattctgggttgtaggtcttggcatattttataaaatagtagatgatgtgagcttatggttatttgcattaaaggccagtgtttttcttgatacatatgtttaagtgtccattcacctttcagttaccttttaaagtagtcctcggtttataaccaactggaaattataccacttgaattctttttatcaggacatgattctaagtggtactgtgcgaagtgaacaaaccagattttggaaaagtggttcagcagtctgtgtattctaattatagggagcattaggactcaaattctccaggtttttagaaaagatttttgtactttaagggtatattgttaatatctgttgagatgcctcacctgagaacctttctctgctgtggttagggagtgttaatcagaatcacttgtgccgtgccctacgcgagaaggactccttgagttctttgaaaacatgtttggaatagaattatagccctgttttcctgagtggaaccagttgtgattttcctttgaaataatttgaatatataaaagattgacattcttctcacatatataatgttgggaatgtaaggtatattcaaaagtaaacatttgtggccaatttttttggctcagattactatgacatggaatccatggtccatgcagacacaagatcatttattctgaagaagccaaagctgtctgaggaagtagtagtggcaccaaaccaagagtcggggatgaagactgcagattcccttcgggtactttcaggacaccttatgcagacacggtagatggtttctttttcttgtgtagttaatttgtgtgattagatagtaaaggttaaccattcgtttgcagcttccctcctccccgccctaaccgctagcgtagagtgctttcattgattcagtagctagcccatgaatagttagccaaattcagttttcaagaattccagttcatctttcttgttcagaaatccattaacctacaaattacaactcagtgtatgatttaactctattaaagattcttttctttatgcaaattcaggaaatgcaagtttaaaagccagctgaccataatcaggtcagctctaaagagagttggcagatcaggtttgggtgatttttcccttagaaaattgactgtttctataaaagaagaaacatacagataattagcataaatgctgctggcccttgtgttctgagcattgatgctaattttttggtttgtttccatgttgaccctatgaagatcgaatgggtgatggggtcaggcttgaggggagattgtccttagtaagtacaggctggagggtcactggtgatgccactgtgactgttcatggccatcgtgtgttagcagagaacccaccagtgctgcacctggtagccctacctagtctttttttattgaaccaaacgcaaagccaagggagtgatagttctgctgaagagcactttagggggctcagcgttttgtgtttgtttccctaattctatggtattttttatctgtctggcagagatcttgtacaaccagataaacctgcaagtcccaagtttatagtgacgctggatggtgtccccagccccccaggatacatgtcagatcaagaggaggacatgtgctttgaaggaatgaaacccgtaaaccaaactgcagcctcaaacaagggactcagaggtctcctccacccacagcagttgcacttgctgagcaggcagcttgaggacccaaatggtagcttttctaacggtgtgttgagagctcagattttcagggtgctgtcattgtgaagggaatctttgacttgtttctctaccttgaatgaatattggttaaaggccttgcttttatttatattcagtaatggccttttttcttctttcagacaaacccaccaagtacatttcagactctttttcctgtgtctttttcataggtgggctgttactccagtttgaaaacggagttcagccatggaacctgagagacctcttccgcttatgctggctaaaggatgaaccaccattcttgttgccttctttacctttgtattttcttcagaaactgtactgccactttgcccttttatcagcaatagtctcttgcaattaacttgagagaaaaatttagatttgatgctatttctacctcagtgaaatttctttgaaaggagtttctcacctaatctatcaagatcttggaactgtttaaattaatgttgaagagtaatatttagcagaactcagatgaactcatttcagatagcaccatagtttttggcaggtgacagtttcttatcaccgtttctttcactgggtatcagtggtagctgcaacgccactgatcatttccattcatgatagagaatggtaattatgttccttatatcttctaaaatatttagaagcacctcttcattggcaggagggataattactcaatcttaaaagcgtacagattcaaaggaaaaacagtaatggattttgaaacatttccttgagtaatcctcttcttggaagagatatgaaaatgtattgaatacctttctcgatcattaaaaatagaatagacttcagagggaaatcatatgttagtggagcaataacacttagctttattttaattggttgcgtttcctactgtgaatcaatgacgtagtgtcgtggttttgattagtggagggagttgaaaatctgaccctatcaacaggaagaaaaacttaaaaaatagtaaaagctgcagtaggcagtcccgatttattgactctgtatgttttgtctaaagagaagactccagtgttttcactactcttgattttcaatttggtaccttaattttttggtctattaggatctggtttcatttaaatgtaggtgtccatatgaggctttatggggtatacatgtagcagcagtgacaccataaataatatgttagtaaaaattcttgccagtgctgtggccattgtgctgacagccatgatgagtggtgagcctcctttcccattgctttgactggggactcagtgtttccctgctgctcaaggatgaagctttgtaagattagcataggggtgtggctggagagactcctgcagaacagttctcaggagtctctagtctctgcaccacttcccctgtgagcagggagtttgaaactgcaattgcttctggttggttttatgttgggttgtttcaaggatgctaccaacaacaacatctgttttaacctgctgtcttttcactcactgtcatatggcagcacagattttatagcttgctttctttgttttttttttttttgagatagagtctctctgtcccccaggctggagtgcaatggagccatctcagctcactgcaacttctgccttccaggttgaaagccattcttctgcctcagtctcccaagtagctgggattacaggcatgcaccatcacacctggctaattttgtagtttaagtagagacggggttttaccatgttggtcaggctaatctccaactcctgacctcaagtgatccaccaacctcggcctcccaaagttctgggattacaggtgtgagccaccgtgcctggcctatagctttcaataaaaggtgaatttgcctcttaaaatttgaacagaaagttttaatagtttacaaagtcggtgtcagccagtgaagactaggggcatgaccttcgtatgacttaatgtttttaaaagaaagataaagtttctttgtaaggtattattgtaataatcacatttctttgtaaagtattatattgttcctgagtatctagctactttgctttccagctaggcttctcttgggtattctcttaatcttttatttgtactgggttcttgtgtatatattatagtctgctgtgtgtaatttattataggaaaagggtaagacacatttactttgcggggatgacacaaaaaacctgtaaaaattagagaaacttccagtcatctcacattttctttggaaccgattattcttgtatcttagaactaaaatgacttatactgttttgtttttagaaagggtatccctcctgttgcccaggctggagtgcattggcacagtcatggctcactgcagcctccacctcccaggctcaagtgattctcccacctcagcctcctgagtagttggttactacaggtgcacaccaccatgcctggctaattttttgtattttttgtagagatggggtttcaccatgttgcccaggctggtctgaaactcctgagctcaagtgatctgcccgcctcggcctcccaaagtgctggggttacaggcatgagccaccacatcctatttaaagcttaaataggacttttactatttttaaagtagcatagaaaactgtttgtatcaggcatagtcataattgctctttgatgctgctcctatctgggctgcatgactacatttgtgtgccttgttctcctgtagtgaggacagaatgtgggtcactggaacagtaagtactcatagaactagctgctgctgctattacgactggttgcctgttttgcattttttccgtttaatcatcagactctaaggaagacattattttctctttgtatagatgaggaaacagaattccaaaaagttagctaacatttgcacagagtgtctggctgagcaactaagtggcagagtcagattttaactgacctctggcaagaggactagaggaatacagttgaagtgatacttgctttcatgaacatgaatgtgaaccataatacataatacccatgatgctattttgtggggagtttaaggtgtctcagtccagaaattagcagctgattattgcctgtagctgtaattttacttattcagtgttatttaataaattgccagcattacaatttcgatgaaggcagatttttggcttactgaaacaggataaaaatctggcaacaggggtcccactttgccctgtcatagtaatcgaagctgtgattggatgtggcacagggagtggagtggatgggtgtgcacttgctttccaggctgctgctccccgtctgtcccttattgcatttatcatcttcagcccagtcagtcttgctgttaggggaactgcccagtctctgtaagtgatggcatttgtgaccccattgtaggtaaaaatgttttcccctttttagacattgctggctgagcgcggtggctcatgcctataatcccagcactttgggaggccgaggtgggtggatcgcttaagtcctggagttcaagaccagcctgggcaacgtggggaaaccctgtagccaggcgtggtggcacgtgctacttggtaggggctgaggtgggagtatcacttgagcctgggaggcagaggttgcagtgagccgagattacaccactggcacaccactgtactccatcctgggtgacagagcaggaccctgtcgtaaaaaaaaaaaaaaaaaaaaaaagtaaaagacattgctgagtttcgcacctggacttacagctcagcaggtgggaatccttttgtatttgggccactcatcatcttgctggcgtgtgaggattcacatctccttatcaccttacctgttttcagtttttatttaattttattagttccccacttgacgtccttctctatttttaattcagctatgaattagtattgagaattagaatttttggtgaaaaatttggccgtagttgcagagtcactgtcctctttccttttcacagtgagaactgttgtcttcttcctggcaaccttttataggattctatggccagtgttaatcccataatttgagctcacttattttatatgactgtacatttaacagaagattctaagacaggtttgagggaaatatgttaaaggtgctgtgtactgaattgatcataatgaatgaaatacttttatttcctttccctttgtagctgagatgagtgaactgagtgtggcacagaaaccagaaaaacttttggagcgctgcaagtactggcctgcttgtaaaaatggggatgagtgtgcctaccatcaccccatctcaccctgcaagtgagtaccatccccccatctcaccctgcaagtgagtaccatccccccatctcaccctgcaagtaccatcccccatctcacctggcaagtaccatcccatctcacccagcaagtaccatcccccacatctcaaccctcaagtgagtaccatcccatctcaccctgcaagtaccatcccatttcaccctgcaagtaccatcccccatctcaccctgcaagtaccatctccccatctcaccctgtaactaccatcccatctcaccctgcaagtgagtaccatccctgcatttcaccctgcaagtaccatctcatctcaccctgcaagtaccaccccctcatctcaccctgcaagtatcatcccccatctagccctgtaagtgcgagtaccatcccccatcttaccctgcaagtaccatcacccacttcaccctgcaagtaccatcccccacctcagcctgcaagtaccatcccccacctcagcctgcaagtaccatcccctatctcaccctgcaagtaccatccccatctcaccctgcaagtatcatcccccacctcaccctgcaagtaccatcccccatctcaccctgcaattgagtaccatcccccatctcaccctgcaagtaccatcccccatctcaccctgcaagtgagtaccatcccccatctcaccttgcaagtaccatcccccatctcaccctgcaagtaccatcccccatctcaccctgcaagtatcatctcaccctgcaagtgagtaccatccccccatctcatcctgcaagtaccatcccccatctcaccctgcaagtaccatcccccatctcaccctgcaagtaccatcccccatcttaccctgcaagtgaataccatccccatctcaccctgcaagtgaataccatccccatctcaccctgcaagtgaataccatcccccatctcaccctgcaagtgaataccatccccatctcatcctgcaagtgaataccatccccatctcaccctgcaagtcatagccagctgattttggctttcagtttagtgtctgtatcttacaccttattttgtttttgtttttctgtggacaagtttttagttttataactaaatggagtgacaattaccatggccctctccagagtagcgtatttcttgttcatgtatgtttgttgagaggcaagggtgggggggctttgtttgtgcctcggacctgtgagatactgaaatacctggggttccttaagaattctgtacgtttaagcagatgggtatatggtaactgccccagtttgtatgcattttggccacacgcagtatacacagattttgaggagttgagggaaaagttagttatgggtaatgaaaacattttggacttgggttaaatttttccttacaagctggctggctcaatgtaatgagctttatgagatggctttttggggcttcttttttttgccgggggtaggtcctatggatggaatcttcatttttaattcttttaaggaaatgatgtgggaataatacagctgtacatataaggagagtatgggatgagtctttttgtatcacaaagccttgcatagaggatgtgtttattgtattaatgagttcactgcataaaatatataccttttttattaagtggtgtgatttttatcacaaaagcttgtctttcttggtggcttggcttgagttaaaagcctgtgtttgtgttatcccaagctttggaataaatgattgtgtcctattttgatatatggtcttattttaaaatattctttttgttgctgttttttttgcatttctcaaaacaagtagtgatggggagtgtaaagagcccttatacacagaactaataatgcattgagaagattgaatatgaaatatgctttttttttgttttgtagagccttccccaattgtaaatttgctgaaaaatgtttgtttgttcacccaaattgtaaatatgatgcaaagtgtactaaaccagattgtcccttcactcatgtgagtagaagaattccagtactgtctccaaaaccaggtgagtgagtgactgtgctactacatttgggtaaaaaatataaaatggcattttgtgactgtaaatggaattgaacaaacaaaagatggtttcagaaataattttggcaggatcagttaatccaaccagtctttaaagagcaagtgtgcctatctgtagtattccgaagtattttgactagtgaatatataaaccttaccattctaatttaaaaatggttttcactttcaaaaaaaacatcagtagactgcattaaaaatgggttttccaaacagattggagatcagtcctggtttttattttgttagcagttgcaccaccagcaccaccttccagtagtcagctctgccgttacttccctgcttgtaagaagatggaatgtcccttctatcatccaaaagtaagaacttctattttctcaaatcaatttagtgacaacatctcaatttcctcatttaacttcttttttgtcagagttactacattggtgcaaaagtaattgcgatttttgccagtaaaactattaagttgttcctcgtcactgaacctccatctggccccttaggccaagtggtctgaaactgttcaatgttagtatcccaagcactcagtggggggaagcatatctttgctagtcacattttccattattccctgcatttaagtatatggatgggttttagcgggggctggggggcagtttgaacctaatgtcagaactgagatgaagaaatccagtaggtactgcttaaaaccatccaaacttgtactgatgatggttgatgaatctccagatgtttagttggtcaaaatgaattatctccttcttgccccggtagcttgaggaccatatgaaggccttcacttgcccccatctgtaactgggcgtagatgagggtactcagtgaagagtgtaagggataattagaagtttttgtggtatgctaaactaccttttgaaattgtacttgctgtgattctttgactagaattttgtgtctcaaggttaagtccatttttcaaggcttcactagtattaaaatggtccttatagatggaatctcttactctgttaatggttagggtgggctggttattgtctcctaagttgtatgttggccaggtgaggtgggtcaggcctgctatcctagtactttgggaggtagaggcagaagtggaaggatcgtttgagcccgggagtttgaaaccagcctaggcaacatttaagagaccccatctcttaaaaaaaaaaaaaacaggcttggtagcacacgcctgtagtcccagctactcgggagactgaggcaagaggtcatgccacttcactccagcctgggtgacagagtgagaccctgtctcaaataataaaataatgtgtttacttatattagccttgtggatattgttgaagctctgttatctctattcagcattgtaggtttaacactcaatgtacaagaccggactgcacattctaccatcccaccattaatgtcccaccacgacatgccttgaaatggattcgacctcaaaccaggtaaacattcaaattcgtttttctcatgtcagttcaaattcttttttctaatttgcagtttctaaatttataagcacacaaaattggaaactagactgttactttgaatttttttctttgctgtttaattatagaaggctcctttggcaaaataatttactacatgggctaaattttacattatccagtggttacttttttaacctagattatcttgctctgttgcccaggttggagtgcagtcacactatcatagctcactgcagcctcaaacccctgggttcaatccatcctcccacctgtagctgagactacaagcgtgtgcctctatacctggctaattttttttattttaagtagagatggggtcttgaactcctgagctgaagcgatatccttccaccgtggccttccaaagtaccaggattacaggcatgagccaccacacccagccagattttaacttctcattatatactacgcaaacatatactaaggccagcaggagtatatatatgtgtactgtacttgaatttcacatccattttcttcgacattagcaactgggagatactgaaaggaagtttcaaaatattttagtgtggccagaaaatttaattacatatggtattatcttttatctacctgacataattgaattatttttaaaaatctgccatttatattgtaatcttatgaccaaatatttattgcttaaaactagtcaactttttaaactgagatatatggtatatatggatacaaagcagataattaaaacaatttttggttctgttcattcagcgaatagcacccagtcctgcctggcagaagatcatgcagtttggaagttttcatgtactgatgaaagatactctacagaacttgtcaaatctttgaaacttggaatatattgctttcataatatgaagttttattgcctatctatctgaagtgtctaatttttcaagtttgtaagtttattatgtggttttaacattgggtgtttttgttttgtttttactatgaaaagacagcttaaggaagagctaaattctgtt

SEQ ID NO: 15897 - DNA, 52394 bp, Homo sapiens
cgtgtgcgcggccgggggcggaacggaggaggaggcggtggtgtcccggctgcggggtaggagtccgcggcagcctccgggtaagccaagcgccgcgcagtgctgagttcccgcacgccgcagagccatggagatcggcaccgagatcagccgcaagatccgggtgaggcccgtgccggtcgggggtgggaagccaggtctcggcgagcgggcggttgtcaggagtaacggggactgtgggcccgggtggacgccgcggcctggcctccgctggacgctcctggcgggctgcggctcctcctcgtccaggccgcctcggccctggggacatttgcggcctcggagcgtggctgcggctgaagtagccgccgggaaatggaaggacaggcgcaggcccggctggagccaccaccgcggcgcacggcgccgctttggatccgctgcgggaggtgggcgccgcggggctggggctggagctggagtggggtgcggggtggggggcggtgcaggcgaggctcctcccagcccccgcccgggggatccgaggtgcgcgcaccagcaaagtggcctcagccgctgcagagtccggtcttgttttcctagagccgcctttctcacatgcacgtttgctctttttctctcagagtgccattaaggggaaattacaagaattaggagcttatgttggtaagtgtttttttggttgttagtcttacagaatttagagtttgcagctaatagaattttagtgaatgcgtatttctcaccgtactttggacattgggagagactcccttctaccttcttcaaatcttatactccctggttacttctttatcatctttttgcaaccttgttttttttctcccaaacctccttctgttatggtgttttgaaatttagtttcctccgttaaggctctgtttgaccgaattttattttatgtttttcctattctctctctctctcattttaaattctagggacgggtctcgctacgttgcccaggctggtcttaactcctgggctcaagcaattatctgaccttagcctccctaggtgctgggagtgcggggattactggtgtgagccaccatgcctgtttaaagtttcctattcttgttactttcctcttgacatttgtttttagaactctgatgttggatgtgaatgtttgatgctttctggcatttgcttctgtaatggttcagtgagttttattttccgatctctttatgttttccctctctctctgaaacagtaaggctttttccgtctctttattcttttataatttgagtgtttactctgggtcaggtactgtgcttaactattgtatatgtattaactcaggataatccctacgagaatcctggaaggtaagtggcagtatctttgactgtgtaaacaaggaaactgaggctttgcctacttgagcaaggttttatggtttgcccccaaagctggtgcctcctataaaaataatagctaccactaatgacagtggttctcaaagtgtgggagactccaagggcctctgaagtcaaaactgttttcatattaatactaagatggtatttgttatttttcactgtggtggtggtgtttggattgtgtaaaactaatggttgataaaacttgtcagcatagtaacaccataatgaaatcatattcaaatcactccccccttgtagtttttttctttttgagccaattacacttaaaatgtcattgatgaagatgtgaagtccagggtttacaaaatattttttatcttcttagtattcagtgcgaggaaatagaaatgctcataaaacatttttattgtatactgaaatacgattgttctgaggaaaatcattttagttgagaactaagctagccacctctttcagggaacatcatttttaacttcaaagtactgacaaactggttacatacactaggatatttggcagatatttacttgaaagtgagcaaagaaaagaatccatagtctttgttgccaatcacatgtgagctttcaaatgaaaattagaattttggaaaatctgagcctgcctccatgaatttcacagcttcccagtacttaaaaaatttctgattaaataaatggtgatttaaaaaaaatttgttattattattattttttttgagatggaatttcactcgttgcccaggctggagtgcagtggcgtgatcttggctcactgcaagctctgcctcccgggttcaagcgattcttttgcctcagcctcccgagtagctgggattacaggcatctgccactacacccagctaattttttgtatttttagtagagacagggtttcaccatgttggccaggctggtctcaaactcctgaccttgtgattcgcgtgcctcagcctcccaaagtgctgggattacaggtgtcagccactgcatccggccaactcaatggcgatattaaaaaataattattttatactgcataatgaaatatatcaacgtgtcagtggtttttgtagctaagtgaaccaatcttttctaaataaccaatgcataatattacaaaattatgcagtggattaaagatttatttaaactctggggtgggtcagtggatttttgtgcaacagttcaaaaaggtcattgacgtatttgacattccacgttgctttaacatttaataagctaccacttgtttagttttggtgtagtgtcacagaagaatatccaccttatctgaaaagactatcagaatactcctttttcaactgcatatctgtgagaccagattttttcatattcttcagtcataagcacatagaacaagatatataaaaatatgaaacaaggccagtctttgcagtaaatttttctttttcttttttttgagatggggtctcactctgtggttcgggctggagtgcagtggtgcaatcttggctcactgcaacctccgcctcccaggttcaagcaattctcctgcctcagcttcccgagtagctgggattacaggcacctgccaccaccccgccccccccccccggctaatttttgtgtttttagtggagacggtgtttcaccatgttggccaggctgatctcgaactcctgaccttaggtgatccacttgtctcagcctcccagagtgctgggattacaggtgtgagccactgtgccttgcctaaatttttttttggaaaatttaataatgttacttgtgttaatataattggatttgtgattaacatgtgatggatttattttttaatgaattaataaatactttttaattaaaaatgatcagttctaattttgaacaccataaataatagaacctgcataaaccaaagaaggggcccaagaccaaacagtttgagaattggtaatttatggagtacttaccaccatttgctgggcactttcataaacgatttgttgtcaggattgttggaagactaacagatgagagaattgaggctcagagaaaataaagctgaaccaagatttatttattcttttattctttcaacacttgaactgcattttttatagttttctttgaaacaaaaaaagtacttctgaaatgaacctttctgcctgcatagaaatattacaagtatttaaggtattaaagaaatttgtcacagcatggtggttcacgcctgtaatcacagcactttgggaggccgaggtgggtggatcacttgaggtcaggagttcgagaccagcctagtcaacatgctgaaacctggtgtctactaaaaatacaaacattagctgggtgtggtggcaggtgcctgtaatcccagctactcgggaggctgaggcaggagaatcgcttgaacccaggaagcagagcttgcagtgagccgagattgtgccactacactccaacctgggagacagagcaagactctgtcgtaaaagaaaaaaaaaaaaaagagaactggaatggagttttgagggtcagagattagagttcctgataacagcttttgcttccttatcttcttagtgaggtttttgtttttttgttcttttaaatcctagacctcactctcataatcactgtaggattaccactaggagggtgttttttggcttcttttatttattttatttatttatttttttttgagacagagtcttgctctgttgcccaggctggagtgcagtggcaggatctgagcgcactgcaagctccgcctcctgggttcacaccattctcctgcctcggcctcccgagtagctgagactataggcgctcaccaccacacccggctaattttttgtatttttagtagagacagggtttcactgtgttagccaggatggtctcaatctcctaaccttgtgatctgcccaccttggcctcccaaagtgctgggattacaggcatgagccaccgcgcctggccttttttcttttttttttttttttatcctagacctcacccttataatcattgtaggattaccactgtgagggtaaaaccgtgcattgagttgacattatttaatgttaaaattgatttttttaaatgatgtggagcttttgggtctatttgtttattcgatgttgctacaagtttgttactgtgagtaattgaaacctgcctttagcaagggtaaagatgttcacttgagaaatgagtgttattttgaaactttgcaaattaaaactaaacaaaactcaattctttttcttggggaatgttcaaatatttcccataagcttctttgaaattaataagcattattaaaaagattcaaggaagtgaatgcatgctcaagtttgaccctataattcagaatgtttagttttgtaagtatcaattattcttaatttccattcttctagtatttgaaatacctgtggaatgaagagaaaaaaattaaagctaagccatcttgtccaatgtaattccagtagagctctgcgactctaaagcttagagctacatctatattttcaagcacatcaactttaagaagaaagttttgaggaaacaaagttttgatctacctttccttttaaatagatgaagaacttcctgattacattatggtgatggtggccaacaagaaaagtcaggaccaaatgacagaggatctgtccctgtttctagggaacaacacaattcgattcaccgtatggtatgtttctgaatttttgtgcctcagaccaaagtttggcacaagcctgagttgatattctgtccaaagagaggttcttgacacttgagttaggtttactttggagaggcagtttgtgagtgatgagagcacagcctctgtattagtccattttcacagtgctatgaagaaatacccgagactgggtaatttctaaaagaaagaggtttaattgactcagagttccacatggctggggaggccccaggaaggggaagcaagcaccttcttcacaagtcgacaggaaagagaagagtgaaggaggaacttccagagacttatataaaatcatcagatcttgtgagaactcactgtctcttgagaactcgggaactcactgtctcttgagaactcactatcatgagaacatcatgggggaaaccacccccatgacccagtcacctccctcccttgacaggtggggattacaattcaatataagatttgggtggggacacagagccaaaccttatcagcctctgaagccagacagccaaagttgaatcctggctgtgtcttgccttggtttctctagctataaaatggaaatagtacagccacttgctttataaaattattattgaggatcaaatgggctaatatgtgtaaagtacttataggtgtccctagcattttcctaaggaattcttagtatatgtcggctatacttaatatgtttcttttgtaaacttctatatctttttttttgagacagggtcttgctctgtcaccaggctggagcacagtggtacaatcatggctcgctgcagcctcgatctcctggtttcaagtgatcatcccattgcagtcccctccttcctgaactcccatgcctgactaatttttaaattttttgttcagacagggtcttagtatgttgccctggatgctcttgaactcctgggctcaagcagtcctcctgccttggccttcagaagtcttggggttataggtatgagccactgcacctggccagcttctgtatcttatagttccttttcccccaccaaaaccagttacagatgtttttttgaactgggttggcttcttacattgccttttacaatgagttacctttagagggcaaggttttctgtttctcacttttctgtttcttactttttaagctttttgttaaactcacaccttcattttgagtaataattgtagtgtaatgttacagcatattttgagattataagtttttttaagtttggaattttaaaataggcaactttgcttttatacataaattactgttatatgcctttagttgagaatactgactagaagagtaagattcaacttaagatgctaggtcctggtaccaggtttgaggtaaagtgaggatgagggctggaggataatgatgtagctgagaatagacagacgaaatactttattaggcttctcaggctaggaactaccagttaccgtgaaaggtgatgatgtagcagaagtgagcaagtggcctgccgaatttgagtgcaagaggaggcactgagtggggagatgagcctggttaagttcttgcctttataccaaaggtcgtcttcaaggtgtttttgcccaagtaggcaactgtatgcttatcaaccgtcttgaaattctgcacagaattctctgggtttatacattgcacaaatttgaagaacattgtatagtggtcatcagttgttatgatacactgctgcctcactgtgggtgacccaacccatttgttacaatttgtccccagaggttattccctcccagccccccacaaaaaaagactgtgggtcttttgactgggaaaattaccattattgtgagtactatttttttttctaaagcgaccgagtagatccttttctccgataacttgatagaatacttagatttttaaaacagactaccaaatgaatttaaaaccaaattaattcaacattctcatctggccataaattgagttctttaacatgtagtgaagcaaagggtgatgtccccattttggcactttgctttcttaagttagtgttcattaacaccagccccaaacagactattgtgattatttggagccttgaagtaattgtgtccgtggggacagtagcatgtgactagggttctcattgaaacatgaggtttctggcatattttgagaggtactgggaagggatgtaaggcaaagtacctcatttataactaccaaaacaggttatgttacaagcaagattacagccttacagcatcagttttgaaagtaatagagtgaaatgatatagcatagtttgagattataacttgttttaacctctcagaattaagttgtccaagacaccatctagtttaagcagttaatataagctgcttaaatggtggtaataataagcaatattacatgtttatgatacttgttttactgtaagctacagtaaatctttagtacttacaaacagggtgacatattttgtagactaagactggtcagatgatattctttcccatatttttgcagaggctagatgttgaaaacagtgaagaaaaaaatacaattttttattgacttctgtaggatttatacaaagcccttttttaaaaatgtgaagtttgaaagttcataccatttattcactaaatacagtttatcagtatttatctcagctaggtgcggtggctcacgcccgtaatctcaacactttgggaggctgaggcaggtggttctctcaagtccaggacttcaagaccagcctggacaacacagtgaaaccccatctctatttaaaaataataaaaatataaaaaaatttaaaaaattatctctgaatataatgtcataaatttagagtgacagttgaaatgaaatctttcttaacagaaggtttatttttgttttttgtttttttcctcaggcttcatggtgtattagataaacttcgctctgttacaactggtaagattcataacttttttttttaatttctgcttgctatggcatatgatttgtttctttctaaagtcatagtgctttgggaaaaacccatcaatttcaaaacggttcatttgaacttttttagaaagcacatacttttatgaacttaagagcagtaaatttaacataattcaaagataatttaagtgtgggagagggagcagtgcactttatccgaaggaaataattacatatatgtgcaaagatttagcctcaaggatatttcagtattttataattgaaaacaatttaaaagttcagtcataataaacgaaattgttgtattaccatgtgtggaataatatttaactattaaaaataatgttgtggaagaataacagaatatacacgcataagatacatgttttaaaaaatgtgtatatatgctcttcccccgaaaaatcacctttgagataattggtgatttttattatatttttaaaattttctacaataaacatactgcttttgaattggtgatgaggaaggaaacgacttaaagtaataaaaatagatggccgggcacggtggctcacgcctgtaatcccagcattttgggaggccaaggtgggcggatcatgggctcaggagatggagaccatcttggccaaccaacatggtgaatctccgtctctactaaaaatacaaaaattagccaggcatcgtggcacatgcctgtaatcccagctacttgggaggccggggcaggagaatcgcttgaaccagggatttggaggttgcagggagccgagaacgcgccactgccctccagcctggcgacagagcgagactccatctcaaaaataaataaataaataaaaataagaaataaaaatagattaaaaggactgtatttttcttttcagaaccctctagtctgaagtcttctgataccaacatctttgatagtaacgtgccttcaaacaagagcaatttcagtcggggagatgagaggaggcatgaagctgcagtgccaccacttgccattcctagcgcgagacctgaaaaaagagattccagagtttctacaagttcgcaggagtcaaaaaccacaaatgtcaggtaagagtctggtgtagacctgctgggggcagatggctctgtgtatgtgacatttatattagtttttatatctttcagtttgctgttctcagcaatttttagaaacaatgaagtgatcgtgagtagttttttgaataaaataatggataagatctaagtatgattatcttttatcacaaatttagtaaatcaaagttgaaagaaagtgcaatttcaaagcagttttgaatggaatatgtaaagggagtatcctcagttttttcattgaaatttttcaagtaaacattctttaaagatttggtgataattgccctaatttggctgtaatacattttgttgttcttttaaatagacagacttacgatgatggagctgcaacccgactaatgtcaacagtgaaacctttgagggagccagcaccctctgaagatgtgattgatattaagccagaaccagatgatctcattgacgaagacctcaactttgtgcaggagaatcccttatctcagaaaaaacctacagtgacacttacatatggttcttctcgcccttctattgaaatttatcgaccacctgcaagtagaaatgcagatagtggtgttcatttaaacaggttgcaatttcaacagcagcagaatagtattcatgctgccaagcagcttgatatgcagagtagttgggtatatgaaacaggacgtttgtgtgaaccagaggtgcttaacagcttagaagaaacgtatagtccgttctttagaaacaactcggagaaaatgagtatggaggtttgtatgtacttttaaattctggcttaggctaaaaatcggcagttcttgataccaaataatatatgaagtaactaaacacatattccaaggctgggcacagtggctcacacctgtaatcccaggactttgggaggccgaggcgggtggatcacgaggtcaggagattgagaccatcctggctaacacggtgaaaccccgtctctactaaaaatacaaaaaattagccaggcatggtggcaggcgcctgtagtcccagctactcgggaggctgaggcaggagaatggcgtgaacctgggaggcggagcttgcactgagccaagatcgtgccactgcactccagcctgggcaacagagcgagactccgtctcaaccaaaaaagaaaaaacaaaaaacaaaaaaaacacatattccaaatttattttattttattttactttttgagaaggagtttcactcttgttgcccaggctggagtgtgatggcgcgatctcaactcactgcaacctccacctcctgggttcaagcgattctcctgcttcagcctcccgagtagctggtattacccgccaccatgcctggctaattttttgtatttttagcaaagacagggtttcaccgtgttggccaggctggtcttgaaatcctggccctgtgatccacccaccttgatcttggctcactgcaacctgtgcttcccaggttcaagtgattcttctgattcagcctcctgaatagctgggattacaggtgtgtactaccacgaccagctaatttttgtatttttagtagagatggtgtttcaccatgttggaccaggctggtcttgaactcctgacctcaggtgatctgccctccttggcctcccaaagtgttgggattacaggcatgtaccatggcgcctggccccaagtttatttttaaattgttttatctgctgtttctcatgctataccagattttcttccccatggcttgctcctagagttcttttgtatcacatctgtatacctttttgggatttccagcatttgagatattaatcttaaattaatttggggggtttcaatcaattttagattgttcatggtaattgctagtgagcaaccaattaactctgttttattagtttcctcaatagcactatatgcagctgttgataaaataaatgtaaagttctaatttttgttttagctaaaggttgactgttagggataatatttatatttatagtatttatttatttatttattttgatacggtgtctcactctgtcgcccaggctggagtgcagtggcatgatcttggctccctacatcctccacctcccgggttcaagtgagtcttctgcctcagcctcccgagtagctcggactacaggcacatgccgccacgctcagctaatttttgtatttttatagagacagggtttcaccatattggccaggctggtctcgaaatcctgaccttgtgatccgcccacttcggccttccaaagtgctaggattacagatgtgagccaccacacccagcctcatatttatatttttacataaaaccaagaaatactctgtgaatttctcatattactgtgtactgtttttttcttaaaatggaaacattttgtggtagaactcttgttattttctgagattaggtaagcataaattttatctgattgcaggatgaaaactttcggaagagaaagttgcctgtggtaagttcagttgttaaagtaaaaaaattcaatcatgatggagaagaggaggaagaagatgatgattacgggtctcgaacaggaagcatctccagcagtgtgtctgtgcctgcaaagcctgaaaggaggtaccttgaacatggctgtaaattaatctttaactgccttggtggagtcttcctgatttattgaagagaataatcacgaaaataatttttgtttgttttttgagacggagtctcgctctgtcaaccaggctggagtgcagtgccacgatctcggctcactgcaacctctgcctcccaggttcaagtgattctcctgattgagcctcctgaatagctgggattataggtgtgcactaccatgaccagctaatttttgtatttttagtagagatggtgtttcaccatgttggaccaggctggtctcgaactcctgacctcaggtgatctgccctcctcagcttcccaaagtgttgggattacaggcatgagccaccgcacctgacataaatatttaatgtaataccgtgtaagacttttccattgggttttgagaaacacgttaatgagagaaattgcttaacattggagaggattgcagagaatattgactaatatggtggggtgaggaggaacaacatcaattaagattcagatttattatttaaaaaaactaaaaggggcctaggcatggtggctcatgcctgtacctagcactttgggaggctgaggcaggaggattgcttgagaccaggagttcgagaccagcctgggcgatgtaatgagtctttgtctcttaaaaaaaattaaaataaattagttggtcattgtggcaggcacctgtagtcctggactggagaggtggatgtggaagcattgcttgagcctagaagtttaaggctgcagtgacatcacactccatcctgggtgagagagtaagagtctgtctaaaaaaaaaaataaggttccagtgtagttggcattttctaaaaactgcagctagtctgtttaaaacctagagaaggttgtggtaaaggcataatagatggctggcctgtgaggaactgaaatttaaagtttaataaaaatacctttcttaactcttttagaccttctcttccaccttctaaacaagctaacaagaatctgattttgaaggctatatctgaagctcaagaatccgtaacaaaaacaactaactactctacaggtaatttaaatgtattatgtttacacttggtaagacatttctgtaattcttgagtaaggtgaaaatgattgctccttaaattgtaaaataaaggtgcctgtcagatgtcaagaccaagatgaggttcccatatagaaaaatggctttaaaaggaaattgacaagtttgagaaacttcgccaactgttattggactgtagtttttcaagcaccatataatgccttttatatctttccaatgtgtgtaaaatatatagtacgtaaatattttgaagagaattttgatgaagtaggactttcatattagtagcattagattcaacattagatatgaatttacgatgtgtaaaggggagtacaattggacaatgataggtatctgaagttatagaaatttgttaaacagtagtatataaacaaggttggtttcttcccttttggcggaactcattagtagaatataaggcagagaattgactcatttgtgatgttcctgctccaattctagtggaagtactgaataattttatgagagaatataaaagtattacgttttcaaaacaggagatgaatcagctgtaagctggtcttacggaaagctgattctgaaatgcaaacaactgatgggtgtcattttgtgttgtcaaattctgtactctctggccgacctgttgtagccaatgtgtaaacttgtgttaagaagctgatggtaatgagctactctaaaaagatttaagttttgctgtggatttggtgggtgtacttacagcattgccctgcttatccactctctcgcttttttttgtgaccccccttcctaaaatgaggtaaactgtagccatcagtttttttatttgttttctttttttgaggcgaagtcttgctctgttgcccaggctggagtgcagtggtgtgatcttggcttactgcaatctctgcctcctgggtccaagcgattctcctgcctcagcctcccaagtagctgggattacaggcgcccactaccatgccaggctaatttttttgtatttttagtagaggcggggttccaccatgttggccaggctggtctcgtactcctgacctcaggtgatcacctgcctcctcggcctcccaaaatgctgggattacaagcgtgagccaccgcgcctggcaccatcagtttttgatcctgatacttgtctgtcctcttggttctcctcatccctaatttaaccttgaacacaaaattcaacaggttttggcatatagaataaagattatcaggcaaaggcgcactcttgacctaatgatatatctacatttcatttcctgatctatcagcaatattaattgtctagaatgatgagaagtttagagaagttccatgactttgaaattttctttctttacctaggttatctaaattacaatttgaaactcatataagatcatgaagctaagcttaaataaaccgcattttgttgaaaatgaatacatatgtactatattgtattcatggtatgtggttgtatggatattgtttacatatgtttggataaataggttcaggtatctatctcagtaacgtaagaaaaaatgaatggtatctatggattgaactcctcatatatatgttcttttcttttctttttcttttttttttggagacagagtctcactctgttgcccaggctggagtgcacagtggtgcaatctcggctcactgcaacctccgccttccgggtttaagcaattctcctgcctcagcctcctgagtagttgggattacaggtgtgtgccactatgcccggctagtgtttgtatttttagtagaaacgaggttttaccatgttggccaggctggtctcaaactcctgacctcaagtgatccacccaccttgcctcccaaagtgctgagattacaggcatgagccactgcgcccagcctgaactcatatgtcctaaaccaaaggaggcatttatatttaatatgacatagtcactgtggagttttgacgtattactgcatttgtatttctatcttttttgcttttatgtgaaagttccacagaaacagacacttccagttgctcccagaactcgaacttctcaagaagaattgctagcagaagtggtccagggacaaagtaggacccccagaataagtccccccattaaagaagaggaaacaaaaggagattctgtagaaaaaaatcaaggtaataacttaaatgatgtttcactctttactacagttttttcatgaggcattgaatattttccaatggatttttatgaaatattacactatgaaaaaagtgatgattaagcccagaaatagaatgagaagaataccatgaggaaggttcataccaacacttcagaaaaaaattttttttttaaagaggtagggtcttgctgtgttgcccaggcagtcctcaaactcctgggctcaagcagtcctcctgcctcagcatccttagtagctggaggtgtgtacaagtgtgtgccactgcacccagccctttctagaaatttttgaaagtctttttattgtggaaatttttaatattctcaaaaatggaaaggctagtacagtgaactctcatgaacccagtcattaagccttagttattatcagaattttgctggtctttagatagctccttcttaaagatatatttatttctgcattctttctttttctctttttgttgatcctgcccgtttacctgaacttgaaattttagttacctttaaatctcccgtctcttaagcatcctgtctctgacctcccatatgtgtcccagcaaccctaatttatcccctcgtgcctaacatacttcagtttgcttccaggttttttttttttttttttttttttgcttttttctcagctttctcccccaattcctatacaatcttttgactttgaaagtgtgtctctcatcttctgactcctttgtgaaagtatctctcccctcctcctcattacccagaactaacgctattagtttggacttttggtgtctgttatctgacccctgggcctgcacagcccttctccatgactcttcagaccttttgtctcttttgtcgtcaagaaggattcttttttcttctgtttctttttctactaagatttgaattttaagaccccaccaaaaaaatctatatgcttattatgttatttctcacatacttttcaagaaccttggaatatattttttcatttcttcaaaactgtcctttaaattgttccaggtttcatgaaaccttatgatttcagaattgtcaattctgtatttgtttcctcattgtgtctctttaaaaatttttgactgtattgttcagtttgccatgacagcgttatatactattctgataattgataggcctgaggacaagacctgtttggtccccaaacagcagataggtaccaattggaaaatgtgaatgggccaaattgagaagaggagctgaaactgaggagggattttgctcagtgcagtggcagatgaggctgatctaaaaggactgcagtggtctactccctgtggagtctgtagtgtgttgcaccaaggttttcttcaaacacaggactctacgtgagagtcttggagtggaatcagatggagcagggaaacagacaatagagaaaaggaaagaatgtcagataaaaataggagaggaaaacaataggaaatctcaaagcaaggtgccatattttttaacatcacaaaatcaacagaagaaggttgttgattctgaagttagaatagctatccaaagcaaactttcccctaaaatgaacaacagaaaagtatcaaggtcaagtcctgtgccgaattaaaagataaaagggaataaaagacaaaacagcattgtttcaatgaaagcatgctgaaaggtataccaaaaagaaatacaatttcaaagtgagctagaagacattatttaaataatacaagacaaagccaagaaaaacataaaacagaagaactttgaggctgggtgcagtggctcatgcctgtaatcccaacactttgggaggctgaggcaggaggatcacttgagactagcctgggcagcatagcaaaaccctgtctcgacaaaaaataaaaatattagctgggcaaggtatacacctgtagtcctgtctccttgggaggctgaagtgggaggattgctggagcccgggaggctgaggtgggaggattgctggagcccaggaggctgaggttgcagtgagccacgatcataccattgccctccagggaggctgaggtgggaggattgctggagcccaggaggctgaggttgcagtgagccatgatcatgccattgccatctagtttgggcgatagagtgagactgtgtctcaaaataaatgaagactaaattagaaagaactcgaaagaattagtgcgtcttaataaaataaaacatgcgtgtaatcccagcaatttgggaggccaaggcgggaggatcacttgaggccaggagttgaagatcagccagggcaacatagcaaaaccttatggctacagaaaacagcaatttaaaaataaataaaattaaaacatcttcagagaaattgaagataaaagacaagaacattttaaaagtctaaaagggctcatgagaaagtggcaaatattgataataggcaatagaaatacagtgtttttatagtaggaatctccaaagaaacaatattcagaggaacagagcaaacattaactgtctttcaagaaaactttcatgaagtgaaaacatgtttgaaactgttgtctgaaaaattgtacagtatacctgagaatatttacccagaaccataacactaagatgtattatataattaatgaaattttaaaaagaaaaaaaatgatttggacattcaggcaaaaggggcacatgacttagaagaaaaggaaaggtagattatcatcaaacttttcaacagcatcacttttgtgctggaagaaaatggactagcatatttaagatactccagaaaagaaaatgtgagccaagaatttaatgtccagcaaaagtgacctttagaagtgatccagcaccaactgttatctatatgcagaaattcagagactcattcccatgaacttttcttaggaaatctaatggaggatgagcttcagacaagtaaaagcctgttgtcctgaatttacattggaaatgtttcggaactcacagtgtattttatatataaatacatttttttctagttctgtctactagaaggcatagaaacattcatcaacccttagcatcatctgtagttcccagattgtggtcttggaatacttcctatttaaaaaactaggcttcttgggctgggtgcagttgctcacgcctgtaatcccagcactttgggaagccgaggtgggcagatcacctgaggtcaggagttcaaaagcagcctggccagtgtggtgaaaccccatctctactaaaaatacaaaaaaattagctgggtgttgtggtgtgcgcctgtagtcctagctactcgggaggctgagccaggagaatcgcttggatccgggaggcggaggttgcagtgagccaagattgtgccaccgtactccagcctgggcaacagagtgagattccgtctcaagaaaaaataaaaataaaaaaacaaagaactaggcttcttgagaaatgtctttttccaggtctggggcaggaaatgttaacatgatcctggaatggctcaacatcccagatagcaaagaagctgtcaatgaatggtagaccacgtccaaaggatgcaggcgccaacttagaggtttccattggccaaaaatggaattatttgagattcagtaggtgtaaatatcgcggtgaattaaagcccatttaaatccacaatttcataatgacattttaaaaaaataagctctaactagtcaccttctggaaggtagtagataatcattcattgtcttgaaaactgggtaaataaaataattgaacatttatgctgtcttttctgtgagaacgataccactgggtaaccccataggacaggagttggcatctgttggaaccaaaccgtgcctattcatgtatgtattgtccgtggctactttcatactacagccttagttgaatagttgcaacagaccatatagcttgcatagcctaaaatagcctaaaagatttgccaacctctgatatagtagatgagagaaacattttcttttaaaatgatttcagctgataagagaacaagatggtaggattagagttatgcttttaagagtgaaaaccagttgttttgtgcctcttgatacaaaagaacagaacttttgtcttgccaaaaatgtaaacctaagtcatcaagctcccagtccagcagtcagtttgcaagaagttgcagaggccagaggagtatgttggttgagcttcaccatgagtgtgcagccggaaaaatagtgtttgggacactgtgggttgaatagcctgagaaattgagattaaaaggcaaatcaaaggaaaataaaaggagcaggattaaattgtagtggctagggatacccagtgtgtgtgaaattataaagaacctctaggcgttaatataaaaagcacatagtggttgcttttgaagaggaccgataaagatggagcacacagagaggcttctggggtggcagatgacgttctctcttttgacttggatggtagtcagaagggtgttttgccttacaaaaattcattaagctatatgtttgtgtggttttctatactgtgttttaaaaggggataattgaaatggtgtcaggtacctttgctgatgaggagtttggtattactagatatattcacaagtgtgaagtgatactgcaagcaactgttatctgttaatgtggttactcactgttgtacggtataatctggggcaggtttttaaaatataaacatgcactcgtattggcataagttgttaattttttttcttcttttgtttgagcagatagcattctctcatttctctggtgtctttatttttactagcgcacccacctcataatatgtgtactttttgctttttgtcttgccatcagtctgtcactagaagtttattttgccgatcttttcaaagacttaacaacattattctggctttattgatttttttttttttttggtgtttttgttttctatttcattgacttgtgctttttttttattttttttttttaagaggcgaggtctcactgtcacctaggctagagtacagtggcacaattgtagctcactgcaacctcaaatgcctgggctcaaatgatcctcccacctcagggaccataggcacacgccaccacgcccagctaatgtttaagtttttttgtaaagatggagtctcactatgttgcccaggctggtctggaactcctgagctcaagcagccctcttgcctcagcctcccaaagtgctaggtttacaggtgtgagccactgcacctggcccgacttctcttttaatttatccttccatattttaaaaattatttacctcaggctgtcttcttctcaaatgtaagcatttgagaagaatacatatgacaggttttaattcatcatgttttcattatcagagtgtctttaatttccattataattttcatcattgaaagtgtgttttctatacagtatttggaagtggtatgtgtttttgtcttttaatcctttttattatagacacctgacttaattgcattgtggttagataatgtaatttttacaatgcatagtttttgaaaattgttaacacttgcttagtgcataatcaagtttatgcatcttccacatgcattttggaagaaagtggactaattattggatggggaattttacatttattcagtagataaagctctactgttaacattattcaaatcttgaccttgctgagtttttgtgctgcttgacttaccacttgagaaagggtgttgaaattgcccaacatgatgacagatttatcttaatttctcttgtacttatatcaagtttttgctttatttttaggctgttatatactattaggtgcatacatatttaaatttgttatatcttctctgcaaattgaatcccttatcttgatttatgaccctctgcaaaaaagatgtttttatctcaaagtcagttttgcctgatattaatatagccatttaattatatttgctttatatatctggtttccctgcctttgttttcagttttctctctcatgctttaggtatatacagttgacccttgaaccagacaagtttgaactgtgtgggtccactcatacacttatatgtggatttttgaaaataaatatattggaaatattttttgagatgtggcaatttgaaaaaacttgtagataaactatatagcctagaaatagtgacaaaattaagaaaaatttaggtatgtcatgaacacataaaatatatgtagctactagactaacatttactatcttaaaacatacacatctattatgaagtttaatttatcaaaatatatgcacacaaacacagactttacatgataccgcttgtagttgagagaaatgtaagcaaacataaagatgcagtaatagctacataagatttactatagtacatactgtactactgtaataattttgtagttacctcctgttgctttatggtaagctaaggtgttttgagtgtccacttaaaatgctgtgtgatgcaaccatctctgcgacagttcagctctccagtaaattgtgaattgcagtgaaaggtgatctcgcagttcttgcatatttttcatcatgtttagtgcaatactgtaaaccttgaataacaccaggggacccataatgtgctactggtgatgctggacatgctcccaagaagtagagaaaagtcatgacattacaagaaaccattgctcagtatgtaccaaagatacatgttacaactgtggctgcagttattcaccatttctggataaatgaatttaacataagaaccatggttaaaaaaaaaagaaaaagaaaaaaatgtatgaagctgccactgcagctacgttggcaacagtaagtagttaaatgtttgggaagtcaaaagttgtatgtgggttttcaactgttgttgggggattggttcccttagccctcatattgtttaagggtcaactatatattatatcttaaatattataaagctggattttgttttttaatctcatctgagtttgccttttattggagagtttagaccagtcacatttattacaattactggtatagttggattactttctgtcatcattgctgatttgcatttgcctgcttttctgttttttctcatgttttttaaggttcattaattactgttattgttgacaaccctaaccctggttctacaattttaaactagtttactgtttaaaccttccctttctgttctttttttttttttttgagacggagtctcactttgttgccaggctggagtgtagtagcgcgatctcggctcaccgcaacctccgactccttggttcaagtgattctcctgcctcagcctcccaagtagctgggattatagacgcccaccactacgcccagctaatttttgtatttttaatagagacgaggtttcaccatattggccaggatggtctcaatctcttgatctctgatcccctgaccttgttatctgcccgcttcagcctcccaaagtgttgggattataggtgtgagccaccatgcttggcctcatttctgttcttttagtcgttaccagtgaaattttaccacacaaatttaatttagtattctaaaagttaatatcctgaccccactctcaaacagtaaaaggacttttgaatacctatgaagagcttcagtctttatcctcctcatttacttgtttccagtgtttcaatttgatcttttttaaaatgcacaagttgggccgggtgcggtggctcatgcctgtaatcccagcactttgggaggctgaggcgggtggatcacctgaggtcaggagttcgagaccagcctgaccatatggtgaaaccctgtctctactaaaaatagaaaaattagccaggcatggtggcacacacctgtagtcccagctactcaggaggctgaggcagaagaatcgcttgaacccaggaggcagaggttgcagtgggctgagattgcgccgctgcactccagcctgagcgacaaagcgacactccttatcaaaaaaaataagtaaaataaaatacacaagttggacaacatttttgtaattttttccaggcaatgttttttgaggtttacctcctgtttatcattttacttattcttaacatctctgagtgttatttggggatcattattttccaatattttgaagtatttttgaagtatttttttggaagtttcactgaaacatgtctgttggcaatatattttccaagagtctattcacctgtgagtgttttctttctttgtgttcttgtgcagtagttttgctggatacccaaatctaggttgttagttatttgctctccacaccttatatatattattatcccactgtcttctgctttccattgttgagtggacttctatcattctaattgtctgtcgttcctttgtaggtgatctgtcctttctctctggctgctttcaagatcttctctttgtgtttgatgttctgcagtttcactacgatgtgtctaggcgtggatttccttttatttttcctgtttggtataatgtatggaagcatcccatatatttgaaataaaatgcattatgaaatacatgctcaccatagaaaatctggaaaaagaaagcatatcaatgtaatatctcctgatagatgagaaaataatcaaatagtataaaaaagattaaaaataaaaagcaacattccttacttcattcttctctatactagtcccactccgcagaatcccccacttttaaatgcttctgtttctttctccgtgttgtaataatatgctttatactgtttcttcattgaccaactagatagtacctgttgatttcttgctgtatgtcaggttctagcccatttatacttttcccttgcttccaagctcatacagcaaaatcaatttttaattcatttattggttactttagtaattttaagtagtaacttaaatatttcttgtctggttatatttcagtatattttgacttctgaaagatatgtatccttcaattcctttttttttttggaggtagagtctcacttttgtcacccaggctggagtgcagtggcgtaatcctggctcactgcaacctctgcctcctgggtttaagtgattctcctgcctcagcctccttagtagcttgggactacaggcacaccctgccacacctggaatttttaataaaatttttagtagagacagggtctcaccatcatgcccaggctggtctcaaactcctgagctcaggcagtctgcccaccttgtcctcccaaagtgctgggattacaggcataagccaccatgccaggcctctctttcaagtcttatattttctttcttgccgccacctacattctgtcctgcctccaccttctaaattgtcacctgttcttttatattgtcaaagctgatcaaatttacattttgttccctactttagttaagacttagtcgattgactctaagttgagaaacagtaagcatttacactgttaagactatttagtctgggcatggttggtggctcacacctgtaatcccagcactttaggaggctgaggtgggagatttgcttgagcctaggaatttgaggccagcgtgggcaacatagcgagaccctcatctatatatatattttaatgttttttaattagctgggtgtgatgatgtgcacctatagtcatggctactctggagaattgcttgagcccaggagttcgaggttacagtgagctgtgattgtgccagcctgggtgacagaccaagaccctgtctctaaaaataaaaaaaaaattttaaagactatataaatattacaaggccaaatttacattctgtttcttgtacagttttgtgtgggaactctctagagtttttttaatttttcccccttttttgtttcccttaggttcttcttttttcccttctttcattgcctacctgtactgtagcctaaaagtcttatcactctgtgctttgaaatctttgggtttcccactttttcttaggtaccttcctcctggagcctctctcctccttttctgacctcactgcttgctctaggcctgctcaaggccatcatcccgaggcgccctcctcccctgagtcggctctgcaattcctgaattccattttgtcttctcagtgcatttctccgttttgtaatcacgtcacaaagaaactccttaagaaagtatagaaggtaaattttctgagttcttggaaatctgaagctatccttgtacttgtttgatactttgactaggtacagaattataggttgaagtcattttcttcagaactttgaaggcatagtttcattatcttgaggcttcagtgttgatgctgagaacttggttgcccatcttattccattgtgtaatacctgggatttttttctccgggaacttttttttttctatgttcctggtgtctgaaatttcactgtggtatgtctagatgctagttaggtacattaggtacccttttaatttgaaaattcattctcttccgtgtgggaaatactcttgcattatttgttttaaaatttgctgtccttgttttcattgttctctggtggaaattctgttagttggatgataagcccttactttaatctgtcagttgtatattttttctctcttgatttttgacttgatcttgttggtctactcttgaatacttgcttgacttgatctttagtctccttactgaacattttaaaaatgtaggcaagcatattttttaatttccacaaactttttcttgttctatttttcatagtatcttactttgtggatacagaatcatctcaactgtctgaagatcctaattaaagggattttttttttcttttcaaggaattcactcttgtcttctaattaatggagtcagagtcagattttatgctttttttcttgctctttcgattatggaatttttttcaaaaacatctgcagatagtggttcctagtttaaggaaaggtagtgcagaggcttacctagaattgtgctgtgggctgagcttttctgcaggcaggtttagctttcaatgaagcagacaaggagctgcaattggccttgcagttgtagaggaatttcttgggggagcaggttggtatgcttacactcctactggttgtctattaaaaatattaaaattttgtcttttaaatgtctgtctctggcagtaccattcacaagccttcttctctgccttacatccttcttggtttttactcattgctgcaatctctcacagttggatggccctttgtttcatccaaattcaaggcttgatatatcatctctgcactgtgactctcacatttttatatctccagcctggaccttgccctgaattcctcatttctgtccaaccactttatatttcttcttggaggtgtaataaatcatttcaaacttgtccaaagctcaactatgaattttcctctcctgtctgttcttcctgtagtcttcctcattttagtttattggtgacttcacctttccagtttctgagacagaatcctgttgccattctttttttctctccttctcctttccttcctcttccctctctacctctgtctccctccttcccttgttccacctgtcagcctctacctccagatttatagaattcactaccgtttatcacttctgcctctaccacccatcaaagtcactgtctggccgggtgcggtggctcatgcctgtaatcccagcactttgggaggccgaggcgggtggatcatatgaggctaggagttcgagacctgcctggccggcatagtgaaaccccgtctctactaaaaatacaaatattagctgggcatgatggcacatgcctgtagtcccagctactcaggaggctgaggtacgagaattggttgaacctgggaggcggaggttacggtgagccgagatcatgccactgcactctagccttggtgacacagtgacactctgtctccaaaaaaaaaaaggcaaaaaaaagtcaccgtctgtgatttgccttggttacttgattattggaatagtgtgttcttacaaggtgtgcctgctttcaaacttgccttccttcagtccatcccacacagcagcagcagtgatcctttacactgtaaattagatcatgctactttgcagcttagaaccccccaggggctccctgtcacactgtaagtcacagtgttctgccttctcatcacccacctgcctccctctgctctggctccccgtgcttgctgctgctcctgcacactggcctgcttgtccttcaggacgttggaagagctgcgcgtctcagatgcttttgccctctcctgagaatgtttactttggatgttctcatatctcatccatgtgtcatctttgaggccttctctggccccatccccacactccctcttttctgaagctttatttttccccataacgtttgtcaccatcaaatacatattttatgtttttgtagtttaggtatttttatccgaacgtaggtctttatgttttaacgtgaattgttttcttttagcatgtatttttttgggggtcttgagagctacctccttccccgtctcaacagagtctgtcctttttgagcagggatttatgtgtttgttctgtatggctgttactgagtgcccagagcagtgtctggcatatagtagcaggagctcagtcagtgtttgttgtctgagtaaatgtcactcctgccttgcatctaacctgcagttttcacaggggctcatttgtggttttgcctgctgtgccttacagccagtatttgtccatatattttctattacccagagattgttgacatctcatctgctgcaccttgtaacccccatctctaaaccagtgatctccatcatatttttgacctgaaaatttttgtacagtagccatttttaagtatgtataccaatatatgtattttacttacgtacacatgctgtattgatatgaatattagaaaacataagaatagaaatctgccgggcttggtggctcacgcctgtaatcccagcaatttgagaggctgagacgggcagatcattaggtcaggagttcgagaccagcctggccaacatggtgaaccgccgtctctactaaaaatacaaaaattagccgggtgtggtgatgggtgcctgtaatcccagctacttgggaagctgaggcaggagaattgcttgaacctgggaggcggaggttgcagtgagccaagattgcgccactccactgtagcctgagcgacagggtgagactccatctcggaaaataaaataaaaaaagaacagaaacccaaagatcatagggtagagatgtagatattaagttctttaattcacttttatggactcttcagaaggagagattataattgtatatgcttgatacattgtgttggactggaagcactgtgaaagattcttagtcaaggggagattttacattcaaagaaaatggaaaatccccctgctttgctcggagggaagaactgcacttaaaagtttgatgtgtattggtgtcgtcttctaggcatttcttatatctgtgaacatgtgcaccctttgtatataaagtggaattacatgtttacttacgcacacacacacatgtacatataaagcaggaattatactacccagagttctctgtgacatttttgttccacttaatgtatcatgggagagtccttgagtgtggacctaggagccagactaccgaaggtgcagaccctgcagtttactagttgatttaacctttctgtaccctagtttcctaatctataaatgaagaataacggtagcatttacttcagagttcttggtaggagtaaatgttaaaatacataagctttctctgctgatgaatatttacactggagtcttaggaagggtccttgcttattttctattctaaagttgggctggacatagtgggccatatgggtgccatcagatgggctcttgtttctctgtgacccgttctgttagacctctttcctgcttttttccttgaggttgtttatctgtcctctagtgaaccagctggtttgcaggtggtgcttttctgagagtgtcttgctgttaacagttactatggatgtcatatgccagctggttctgttaaaaaaaagtctgtgaatccaaagccttgaattttgaacattattttctgtctggaattttgaagaactgattcataaagtggagaaatgaataaagatttttattttacaaattccagcacttagcattttctttattctgttactgtgacatctatttgggaaaccaaagactaccattctttataaggattcctttttttttttttttttttttttttttgagacagattctcactctgtcacccaggctgcagtgcagtggcgcagtctcactcaccgcagcctctgccttcccaggttcaggtgattctcatgcctcagcctcccgagtagctggaattacaggcatatgccaccacgcctggctaatttttgtatttttagtggagacagggttttgccatgttggccaggctggtcttgaactcctgacctcaagtgatccacctgccttggcctcccaaagtgctggaatgacaggtgtgggcctctgtgccaggccaggattcttcttttaagagactatagtgagcagcatctaccaacttgcatccttgtatgttgcatatcttatttgtttgcttggggagtaaaccaaagtaaaaacgtcctttgtcaaattaaggaccttacaagattttctgtgttaatggattggaagtctttactattctttttttttttttttgagatggagtctccctctgtcgcctaggctggagtgcagtggcacgatctctgcttattcagtctctgcctcccgggttcaagcgattctcctgcctcagcctcctgagtagctgggataacaggcgtgcgccaccacacctggctgatttttgtatttttagcagagacgggatttcgccacattggtcaggctggtctcgaactcctgacctcataatccacccaccttggcctcccaaaatgctgggattacaggcatgagtcaccacgcccagcctagatgtctttactattcttaagatggcagtagtccccaagttgatctatggattcaactcaatccctgtttaaaccccaaattgcttttttttgtagaaatcggcaggctgatcctaaaattcatatggaaataaaaagggactgagaatagccaaaactattgaaaaagagtaacgttggcaaggttatgttgcttgatttcaaaacttactacaaagctagagtaatgaagactgtgtggtactggcataaggatgaccatacagacccgtggaccggaattgagaatccagaaataaatgcatactttcacaacccatcaatttttggcagcggtgttaagacagtttattggcaaaagaataggtttttccacaggtgatgctgggacaactgaatatccacatgaaaagaatgaagttggaaccttatcttatgtcataaacaaaaataactcaaaatggatcaaaaacctaaacttcaaaactcttagggaaaaaaatagatatgtcttggattccagaatgatttcttaaatatgacaccaaaagcacaagcaaccaaaggaaaaaagataactcggacttcatcaaaatttagtatttttgtgtttcaaaagatactatcaaaaaaaaaaaagacaacaaaatgggagagaatatttaagaaacacctgtctaataatggtctagtattaagccaaggctgagttcttatttccccatccttaagtttacacgatactatattagtgaagttgaattctgtcattaccacatgtatcttgaaagaagtttgtgtggatcacgggtccagttactttctccgccctttccctccagaggatttgtcactctcaataatgttatatactaatttcaaggggaaatacaactcaaaacaaatcagaaatctgaagcttaaaaatgttatggtttagatgatgaaaagggaaaagtacatttaattcatatcatatttagatgtaaagcacttaatgttatattgcttaacctataaagtagcgcttcagtgctctcatcatatgaagtaaataatagaaaattctttgtgtgacacatgtctgttttcagccaatcagaaaccaggattattttgtatgtaataatagggtttactggaagaggagctatacagatggtacttagaggatgtagggccctacgtattagggcttcttagttgtagcgaagagcaattggtctggtacgtttagctttttcacatttagttttgaattctgactctagaaatgtacaaccccatcttttgaattacaggttttaagatgttatttgctcttaatacgtcttaaggtaacagccttgatcactgcttttactttcgatgaaataacttaatgagctgtgaagaaaaaattatcagattttaagggagagaattttatgaaaatgtctttgaggttcctgtcacctttatgagaatgtcttcaaagtttccatcaccacctctaccaatttttcttccaccggagccagtggacttaggttccataacaagctcctcttgttcactgaatgagctagacaatatttcccaccttttaaggaaaatatcagctgatatcaatgaaattaaaggaatgaaagcagctattttgacagtggaagcaaatctttttgatctaaatgttagagtgtccaagaatgaagcaaaaatttcatctttggaggttaaaatgaatgaatattcaacaacatatgaatgcaacagacagtttgaagatcaagaagaagatactgaatcacagtcaagaactactgatgtaaaaataatcggcttccttagaaacgttgagaaaggtaaactcttaatatatgatatgttctaggtacccatcctttgatctgtatctttccacgtatgttgactgtagctctgatgtggagggagcaagttacagagaacttgaatttttcatggacctttaatgacaaatttggattctgcttgatttagcttagcaatctagaattgatcagaattccatcctctttaatggagctctctaaaacgatgttttgaaaagacagatgaacctagagcaatgaagcaaaacttgaaatgtggaagtgtggtctttcatgtgtcttgtgaaattattttaaaatgtctcattctttcatcatgtactgttgatgtgaaggagacctgttgcagtatttggatggaaagagcattcttcctgtaacttttcacctcagttttccaagcttcccacaggaatgcaacttgacctaagtgtcatcttcgttacagttcctcagaatgtgtgtttttttatggtaataattctggaaggaattgacttttttgggacgcaccagtaaaatttcatataacttatgttttaaaggaaactaactgatacaatttcaaatcgagtataggttttaaaatttaaaaacaccttttaatgaaatgtggtgcttggtgggagatggcccacttaacatctttgcactgagtaagcaaagcctgtccttgtgaagccacctgtaatggatatacccaaaatcagcatgtgggcatcttagtaagatttcagtatttgcaaccctatcagttacatccctttgtacactgtagtgcagtaccttataatgagcaagtgagtgcctgatgtctgctaagcgctgtgggggctacagaaaagtgtgacattctcccatcctcaaggagcttaacatcaaatcgaggatggaaaaaaatcagttctttgtccctattttgtgcagtcagactgctgggcatattattgttaggaatagtgaacctaataggaattaatgttaggagcctattttagaagaaataagtagttgaacatcttttcttgtggaagaggcaaagaattattatcatgctttgctaacatagggtgtggattgtagagctgagtgtcttattgttttctttgcatgcatcgaagcccagagtttgtcttttaggaactcttgtttagatgatgagagtgttttgttttgctatttcgattatcttcaaaggtcatgagtgagtcgtgatggtaagagctcaggtgatggagggaggtgcttgccatgcttattgtgcagttggctgtgatgcgagctgctgggccacaaggtgccttttcctggattttccacccgtttgccacctttactttccccgcagaattcaaattcaggaaaactgatgtcctcatagagggagaaccaggagtgttttaaattggcatttgtggtttaaccctgagtacagccttttttgtcttacaggatatgtctttggtctataaatactattaaattgaattgttgaagctttaagttacttttaagacttcaagttaagaacccagaaggattgatttttgggaaccacatgctggtattgtctgtgttgtaagcttagtgaagttttaaaatttatattctaggaactcaacagaggcaattattatcccgactgcaaatcgacccagtaatggcagaaactctgcagatgagtcaaggttggtaatgtttcaagttgtactgtaatccagccatttcagttgccatttccatttcttacaccccatttaacgtatctcggatctcttagatcctgccctaagatgttatatttagatctgtgaaaatattttagggccaggagataagatctgcatttctttcatgttatatagtgttataattttttgcctcattggaaaactttgttcctttcacaccattccaagtgtgtccctagcactgtcggctgtcactctcctgctgtcaggagtgacctgcgtttctgatttaccctcccactctacccagcttttgtcattgccatgagtggcttttgtatcctgtttttcacctggttagccttatcctcttgtacttcattttggagtcttatcaccagggccacacctggaacttgttgttctagtgttctagagccactctagtttgcctgtctcctttcctctccccacagacacacatgccaggggctactccaggactggagctgacgccttcatttttattatctctgtcctcagtgcccagcccctgccagatgcatgttcaatgtcttaaaaatgactgcaggataaacacaggcaaccatgagagacccggaatcatctcagtccttctgtttcccctaagtctgtcttttgtgggaagctctggtccctagacccctctcagtcaggactccacagtcagtcactctgttccccgaccctcccccagctttccagctcagaaagtgtgcttttcctccctaagggtcagcctccaccagaggccagatcccactgggttggtgagccactggcatgtcacccactcctccaacttcattctctgcctcctgtcttctctctgtagaggtgttcagacattctctgcccgtgattttgctctctcatctcccagcagtccgtcctgcttcctccacaggagtatttgaaaaggttgacagccgagatctgtgtgtgggatccacttcatcagctcttgtgcatgttttctcttctgcctccttcagcttttcattgtacccatggtgcacgcagtttgaaatagcaagtagttctgtgaggcttatgaatgactgcagtccttagctcctatcacattttttattctaagatccctttgtttctgcatattctattaattttctaaaaacatactgattttgtgtacacaatactctttgttatttctctgtggtctgaaaggtggttttgacatttttcccctccctgcttcgtcttgttttctctaagtggtctgttttggctgtcttttatgctggaggttcccctctgatgtctggggatcctaggtggtcttacatttaagagtggagcactcagaaggtcactggtattctgggttcatgagttggggcatggggcactttgactttctgtttgaaactagaccctgtggtggaaagtgatttgtcctgcctgtctggtttgtgggcaccctgatgtcactgccttcaagactttcctctcaggctggtcagcttctccaaaacaaagtttttcaagtaatagcctggtagtcagagttctgcgagcttaagtggggaaagaaggctgggggaggcacctcaccattaattattatgtaatgtttatttaaccctcccccaaccattgtcagtccagtacttctttcatcatggctggtgtctcttggtccagggactctgttcttatcctctgaagagtctaaagctccactttctccaagggagaatgcatgcagtgggtaaagatttatcaggaaatctaattgcctttaaaaatttttaacagtgtaccttcaggtgattttgtcgtagcatctttctggcagagaccctaatgcttcatccataggcctctccgaagattatctacaggaaagcacatcaccagtcatcccaggtgtcttcagtgtagaggtcgggattggtgtggcaagcatcaaaaccaagaaaacagtggccaggtgcagtggctcacgcccataatcccagcacttggggaagccaaggcaggcagatcacttcaggtcaggagttccagaccagcctggccaacatggcgaaacccaatctctactaaaaaatacaaaaattagccaggcgtggtggtgcacatctgtaatcccagctactaaggaggctgaggcaggagccttgcttgaacccaggaggcggaggttgcagtgagctgagctcgcaccactgcactccagcctgggtgacagagcaagactgtctcaaacaaagaaaacagatacatggaattagagttgaagaagaactaactgcttcttggacacatctaatacacctcttttttgcctgccatttcttccatttcttcctaaggtccttttactgccagttcctgagcctttggagaatcttgtggtctgaattggattgcttcattattgccttagaattcagcttttacagatcccctgagttcttaatcatctgttttccactttgaaaatttctttttacacttattttctttgtgagtttatgctttcaaaacaaaaacaaaacccttattgacatttctgtgggctttcaggagggaacaaaaagtaaatgcatggggtcagcctgtggtctctactcagaagatgttacttactcccccgtctgtctggtctccatgtgacctgggctgctaacgttccgcttgcagagaggtgtgcgggagggaccggtgcacgctttcctcaaccctggagcatgttacacttgggttcccatactttctccaagctttgacctttcggcttccagttcactctgtctttattcttctcattccctttcattctcatgtgtcagcgcatctcctccattcctcctcaaaaggttagctttgctctctcccaccttcagcattattttcatctcttctgtgttcacccaacctatgaactggtagaactccttcgtctcagaaagtgcagagtggtgggaaggagtgaagcagcccctgggccactgttgggacccacctttgacagttgtgagacctcggtgaatcatttaataacttggagctgcaaacagtcatctgtaacatgggaggaaaccgactttgtaggctttgagtgaggattcagtgagagacggccaccctgaatatgttaaacacttctgtcaccttcggttttgactcagcatcttatttctgtccccccacctacaggtcaaatctgaattttctacttcctcttaaacatgggagagtcccacaaagactttaaatctaacatggaaatgtatctttgccccttttaactttgctctttttcttttgctaagtttctcatcccagctttctcttccgcctgtctccctttaccatctgtactgcccttgctggggaaggcgggcacgccccttcccaggatggagcatgtcttctcttcctgtcaggtgtgtgagaccaggacagacagcagagaatcttttcattcagagcctcaccctctgtcccgggcaacagcaggtcgagaactctggttcttccttaacactgtttttctaaaaaccagtttgatcaggccacttccttccttaggaacctctcttgatttcttttctcttttttttttttttggtttgagatggagtctccctctgtcactcgtgctggagtgcagtggcacaatcctgctcattgcagccttgacctcctgggcccaagcacttctcccacctcagcctcccaagtagctgggactgcgggcatgtgctcccacgcctggctaattttatttatttatttattttctggttgatgggaggtctcactatgttgcctaggccggtctcaaactcctgggcttatggaatccttgtgccttggcctcccagaatgttgggattacagacatgaaccgccacaccaggccacttgatttcttactaattatagaccagaatcgagagtcactgagacatagaagaacctttattatatgtgtcagccttccttggtatgtactgctgagcccaccacacacacccttccagccattccacattctaacctttctcagatgccttcggccttgtgaaagcccctttccttctacgtgcgttttcctctgcctgaagtgctgtgttcgtttctccgagtctctctccttgtttattcctgcttgttcctttactgctgacttcagatgttcctccttgctaagcttttcgttggttcttggctggagtgggctgttctgtattctcagcaccttgttcacatcccttttgggtcatgctattctgaaattgtatatgtgtctgtttttctttttttctttgtgtatctagctcagttctcttagttgttcagtaaatactcagtgaatgaacataaatgaataccctgtaaattttggtctctaagctttaaaagaagtgtattaacttcagtccgttgatggcgtattgataggtcagccattctgggttgtaggtcttggcatattttataaaatagtagatgatgtgagcttatggttatttgcattaaaggccagtgtttttcttgatacatatgtttaagtgtccattcacctttcagttaccttttaaagtagtcctcggtttataaccaactggaaattataccacttgaattctttttatcaggacatgattctaagtggtactgtgcgaagtgaacaaaccagattttggaaaagtggttcagcagtctgtgtattctaattatagggagcattaggactcaaattctccaggtttttagaaaagatttttgtactttaagggtatattgttaatatctgttgagatgcctcacctgagaacctttctctgctgtggttagggagtgttaatcagaatcacttgtgccgtgccctacgcgagaaggactccttgagttctttgaaaacatgtttggaatagaattatagccctgttttcctgagtggaaccagttgtgattttcctttgaaataatttgaatatataaaagattgacattcttctcacatatataatgttgggaatgtaaggtatattcaaaagtaaacatttgtggccaatttttttggctcagattactatgacatggaatccatggtccatgcagacacaagatcatttattctgaagaagccaaagctgtctgaggaagtagtagtggcaccaaaccaagagtcggggatgaagactgcagattcccttcgggtactttcaggacaccttatgcagacacggtagatggtttctttttcttgtgtagttaatttgtgtgattagatagtaaaggttaaccattcgtttgcagcttccctcctccccgccctaaccgctagcgtagagtgctttcattgattcagtagctagcccatgaatagttagccaaattcagttttcaagaattccagttcatctttcttgttcagaaatccattaacctacaaattacaactcagtgtatgatttaactctattaaagattcttttctttatgcaaattcaggaaatgcaagtttaaaagccagctgaccataatcaggtcagctctaaagagagttggcagatcaggtttgggtgatttttcccttagaaaattgactgtttctataaaagaagaaacatacagataattagcataaatgctgctggcccttgtgttctgagcattgatgctaattttttggtttgtttccatgttgaccctatgaagatcgaatgggtgatggggtcaggcttgaggggagattgtccttagtaagtacaggctggagggtcactggtgatgccactgtgactgttcatggccatcgtgtgttagcagagaacccaccagtgctgcacctggtagccctacctagtctttttttattgaaccaaacgcaaagccaagggagtgatagttctgctgaagagcactttagggggctcagcgttttgtgtttgtttccctaattctatggtattttttatctgtctggcagagatcttgtacaaccagataaacctgcaagtcccaagtttatagtgacgctggatggtgtccccagccccccaggatacatgtcagatcaagaggaggacatgtgctttgaaggaatgaaacccgtaaaccaaactgcagcctcaaacaagggactcagaggtctcctccacccacagcagttgcacttgctgagcaggcagcttgaggacccaaatggtagcttttctaacggtgtgttgagagctcagattttcagggtgctgtcattgtgaagggaatctttgacttgtttctctaccttgaatgaatattggttaaaggccttgcttttatttatattcagtaatggccttttttcttctttcagacaaacccaccaagtacatttcagactctttttcctgtgtctttttcataggtgggctgttactccagtttgaaaacggagttcagccatggaacctgagagacctcttccgcttatgctggctaaaggatgaaccaccattcttgttgccttctttacctttgtattttcttcagaaactgtactgccactttgcccttttatcagcaatagtctcttgcaattaacttgagagaaaaatttagatttgatgctatttctacctcagtgaaatttctttgaaaggagtttctcacctaatctatcaagatcttggaactgtttaaattaatgttgaagagtaatatttagcagaactcagatgaactcatttcagatagcaccatagtttttggcaggtgacagtttcttatcaccgtttctttcactgggtatcagtggtagctgcaacgccactgatcatttccattcatgatagagaatggtaattatgttccttatatcttctaaaatatttagaagcacctcttcattggcaggagggataattactcaatcttaaaagcgtacagattcaaaggaaaaacagtaatggattttgaaacatttccttgagtaatcctcttcttggaagagatatgaaaatgtattgaatacctttctcgatcattaaaaatagaatagacttcagagggaaatcatatgttagtggagcaataacacttagctttattttaattggttgcgtttcctactgtgaatcaatgacgtagtgtcgtggttttgattagtggagggagttgaaaatctgaccctatcaacaggaagaaaaacttaaaaaatagtaaaagctgcagtaggcagtcccgatttattgactctgtatgttttgtctaaagagaagactccagtgttttcactactcttgattttcaatttggtaccttaattttttggtctattaggatctggtttcatttaaatgtaggtgtccatatgaggctttatggggtatacatgtagcagcagtgacaccataaataatatgttagtaaaaattcttgccagtgctgtggccattgtgctgacagccatgatgagtggtgagcctcctttcccattgctttgactggggactcagtgtttccctgctgctcaaggatgaagctttgtaagattagcataggggtgtggctggagagactcctgcagaacagttctcaggagtctctagtctctgcaccacttcccctgtgagcagggagtttgaaactgcaattgcttctggttggttttatgttgggttgtttcaaggatgctaccaacaacaacatctgttttaacctgctgtcttttcactcactgtcatatggcagcacagattttatagcttgctttctttgttttttttttttttgagatagagtctctctgtcccccaggctggagtgcaatggagccatctcagctcactgcaacttctgccttccaggttgaaagccattcttctgcctcagtctcccaagtagctgggattacaggcatgcaccatcacacctggctaattttgtagtttaagtagagacggggttttaccatgttggtcaggctaatctccaactcctgacctcaagtgatccaccaacctcggcctcccaaagttctgggattacaggtgtgagccaccgtgcctggcctatagctttcaataaaaggtgaatttgcctcttaaaatttgaacagaaagttttaatagtttacaaagtcggtgtcagccagtgaagactaggggcatgaccttcgtatgacttaatgtttttaaaagaaagataaagtttctttgtaaggtattattgtaataatcacatttctttgtaaagtattatattgttcctgagtatctagctactttgctttccagctaggcttctcttgggtattctcttaatcttttatttgtactgggttcttgtgtatatattatagtctgctgtgtgtaatttattataggaaaagggtaagacacatttactttgcggggatgacacaaaaaacctgtaaaaattagagaaacttccagtcatctcacattttctttggaaccgattattcttgtatcttagaactaaaatgacttatactgttttgtttttagaaagggtatccctcctgttgcccaggctggagtgcattggcacagtcatggctcactgcagcctccacctcccaggctcaagtgattctcccacctcagcctcctgagtagttggttactacaggtgcacaccaccatgcctggctaattttttgtattttttgtagagatggggtttcaccatgttgcccaggctggtctgaaactcctgagctcaagtgatctgcccgcctcggcctcccaaagtgctggggttacaggcatgagccaccacatcctatttaaagcttaaataggacttttactatttttaaagtagcatagaaaactgtttgtatcaggcatagtcataattgctctttgatgctgctcctatctgggctgcatgactacatttgtgtgccttgttctcctgtagtgaggacagaatgtgggtcactggaacagtaagtactcatagaactagctgctgctgctattacgactggttgcctgttttgcattttttccgtttaatcatcagactctaaggaagacattattttctctttgtatagatgaggaaacagaattccaaaaagttagctaacatttgcacagagtgtctggctgagcaactaagtggcagagtcagattttaactgacctctggcaagaggactagaggaatacagttgaagtgatacttgctttcatgaacatgaatgtgaaccataatacataatacccatgatgctattttgtggggagtttaaggtgtctcagtccagaaattagcagctgattattgcctgtagctgtaattttacttattcagtgttatttaataaattgccagcattacaatttcgatgaaggcagatttttggcttactgaaacaggataaaaatctggcaacaggggtcccactttgccctgtcatagtaatcgaagctgtgattggatgtggcacagggagtggagtggatgggtgtgcacttgctttccaggctgctgctccccgtctgtcccttattgcatttatcatcttcagcccagtcagtcttgctgttaggggaactgcccagtctctgtaagtgatggcatttgtgaccccattgtaggtaaaaatgttttcccctttttagacattgctggctgagcgcggtggctcatgcctataatcccagcactttgggaggccgaggtgggtggatcgcttaagtcctggagttcaagaccagcctgggcaacgtggggaaaccctgtagccaggcgtggtggcacgtgctacttggtaggggctgaggtgggagtatcacttgagcctgggaggcagaggttgcagtgagccgagattacaccactggcacaccactgtactccatcctgggtgacagagcaggaccctgtcgtaaaaaaaaaaaaaaaaaaaaaaagtaaaagacattgctgagtttcgcacctggacttacagctcagcaggtgggaatccttttgtatttgggccactcatcatcttgctggcgtgtgaggattcacatctccttatcaccttacctgttttcagtttttatttaattttattagttccccacttgacgtccttctctatttttaattcagctatgaattagtattgagaattagaatttttggtgaaaaatttggccgtagttgcagagtcactgtcctctttccttttcacagtgagaactgttgtcttcttcctggcaaccttttataggattctatggccagtgttaatcccataatttgagctcacttattttatatgactgtacatttaacagaagattctaagacaggtttgagggaaatatgttaaaggtgctgtgtactgaattgatcataatgaatgaaatacttttatttcctttccctttgtagctgagatgagtgaactgagtgtggcacagaaaccagaaaaacttttggagcgctgcaagtactggcctgcttgtaaaaatggggatgagtgtgcctaccatcaccccatctcaccctgcaagtgagtaccatccccccatctcaccctgcaagtgagtaccatccccccatctcaccctgcaagtaccatcccccatctcacctggcaagtaccatcccatctcacccagcaagtaccatcccccacatctcaaccctcaagtgagtaccatcccatctcaccctgcaagtaccatcccatttcaccctgcaagtaccatcccccatctcaccctgcaagtaccatctccccatctcaccctgtaactaccatcccatctcaccctgcaagtgagtaccatccctgcatttcaccctgcaagtaccatctcatctcaccctgcaagtaccaccccctcatctcaccctgcaagtatcatcccccatctagccctgtaagtgcgagtaccatcccccatcttaccctgcaagtaccatcacccacttcaccctgcaagtaccatcccccacctcagcctgcaagtaccatcccccacctcagcctgcaagtaccatcccctatctcaccctgcaagtaccatccccatctcaccctgcaagtatcatcccccacctcaccctgcaagtaccatcccccatctcaccctgcaattgagtaccatcccccatctcaccctgcaagtaccatcccccatctcaccctgcaagtgagtaccatcccccatctcaccttgcaagtaccatcccccatctcaccctgcaagtaccatcccccatctcaccctgcaagtatcatctcaccctgcaagtgagtaccatccccccatctcatcctgcaagtaccatcccccatctcaccctgcaagtaccatcccccatctcaccctgcaagtaccatcccccatcttaccctgcaagtgaataccatccccatctcaccctgcaagtgaataccatccccatctcaccctgcaagtgaataccatcccccatctcaccctgcaagtgaataccatccccatctcatcctgcaagtgaataccatccccatctcaccctgcaagtcatagccagctgattttggctttcagtttagtgtctgtatcttacaccttattttgtttttgtttttctgtggacaagtttttagttttataactaaatggagtgacaattaccatggccctctccagagtagcgtatttcttgttcatgtatgtttgttgagaggcaagggtgggggggctttgtttgtgcctcggacctgtgagatactgaaatacctggggttccttaagaattctgtacgtttaagcagatgggtatatggtaactgccccagtttgtatgcattttggccacacgcagtatacacagattttgaggagttgagggaaaagttagttatgggtaatgaaaacattttggacttgggttaaatttttccttacaagctggctggctcaatgtaatgagctttatgagatggctttttggggcttcttttttttgccgggggtaggtcctatggatggaatcttcatttttaattcttttaaggaaatgatgtgggaataatacagctgtacatataaggagagtatgggatgagtctttttgtatcacaaagccttgcatagaggatgtgtttattgtattaatgagttcactgcataaaatatataccttttttattaagtggtgtgatttttatcacaaaagcttgtctttcttggtggcttggcttgagttaaaagcctgtgtttgtgttatcccaagctttggaataaatgattgtgtcctattttgatatatggtcttattttaaaatattctttttgttgctgttttttttgcatttctcaaaacaagtagtgatggggagtgtaaagagcccttatacacagaactaataatgcattgagaagattgaatatgaaatatgctttttttttgttttgtagagccttccccaattgtaaatttgctgaaaaatgtttgtttgttcacccaaattgtaaatatgatgcaaagtgtactaaaccagattgtcccttcactcatgtgagtagaagaattccagtactgtctccaaaaccaggtgagtgagtgactgtgctactacatttgggtaaaaaatataaaatggcattttgtgactgtaaatggaattgaacaaacaaaagatggtttcagaaataattttggcaggatcagttaatccaaccagtctttaaagagcaagtgtgcctatctgtagtattccgaagtattttgactagtgaatatataaaccttaccattctaatttaaaaatggttttcactttcaaaaaaaacatcagtagactgcattaaaaatgggttttccaaacagattggagatcagtcctggtttttattttgttagcagttgcaccaccagcaccaccttccagtagtcagctctgccgttacttccctgcttgtaagaagatggaatgtcccttctatcatccaaaagtaagaacttctattttctcaaatcaatttagtgacaacatctcaatttcctcatttaacttcttttttgtcagagttactacattggtgcaaaagtaattgcgatttttgccagtaaaactattaagttgttcctcgtcactgaacctccatctggccccttaggccaagtggtctgaaactgttcaatgttagtatcccaagcactcagtggggggaagcatatctttgctagtcacattttccattattccctgcatttaagtatatggatgggttttagcgggggctggggggcagtttgaacctaatgtcagaactgagatgaagaaatccagtaggtactgcttaaaaccatccaaacttgtactgatgatggttgatgaatctccagatgtttagttggtcaaaatgaattatctccttcttgccccggtagcttgaggaccatatgaaggccttcacttgcccccatctgtaactgggcgtagatgagggtactcagtgaagagtgtaagggataattagaagtttttgtggtatgctaaactaccttttgaaattgtacttgctgtgattctttgactagaattttgtgtctcaaggttaagtccatttttcaaggcttcactagtattaaaatggtccttatagatggaatctcttactctgttaatggttagggtgggctggttattgtctcctaagttgtatgttggccaggtgaggtgggtcaggcctgctatcctagtactttgggaggtagaggcagaagtggaaggatcgtttgagcccgggagtttgaaaccagcctaggcaacatttaagagaccccatctcttaaaaaaaaaaaaaacaggcttggtagcacacgcctgtagtcccagctactcgggagactgaggcaagaggtcatgccacttcactccagcctgggtgacagagtgagaccctgtctcaaataataaaataatgtgtttacttatattagccttgtggatattgttgaagctctgttatctctattcagcattgtaggtttaacactcaatgtacaagaccggactgcacattctaccatcccaccattaatgtcccaccacgacatgccttgaaatggattcgacctcaaaccaggtaaacattcaaattcgtttttctcatgtcagttcaaattcttttttctaatttgcagtttctaaatttataagcacacaaaattggaaactagactgttactttgaatttttttctttgctgtttaattatagaaggctcctttggcaaaataatttactacatgggctaaattttacattatccagtggttacttttttaacctagattatcttgctctgttgcccaggttggagtgcagtcacactatcatagctcactgcagcctcaaacccctgggttcaatccatcctcccacctgtagctgagactacaagcgtgtgcctctatacctggctaattttttttattttaagtagagatggggtcttgaactcctgagctgaagcgatatccttccaccgtggccttccaaagtaccaggattacaggcatgagccaccacacccagccagattttaacttctcattatatactacgcaaacatatactaaggccagcaggagtatatatatgtgtactgtacttgaatttcacatccattttcttcgacattagcaactgggagatactgaaaggaagtttcaaaatattttagtgtggccagaaaatttaattacatatggtattatcttttatctacctgacataattgaattatttttaaaaatctgccatttatattgtaatcttatgaccaaatatttattgcttaaaactagtcaactttttaaactgagatatatggtatatatggatacaaagcagataattaaaacaatttttggttctgttcattcagcgaatagcacccagtcctgcctggcagaagatcatgcagtttggaagttttcatgtactgatgaaagatactctacagaacttgtcaaatctttgaaacttggaatatattgctttcataatatgaagttttattgcctatctatctgaagtgtctaatttttcaagtttgtaagtttattatgtggttttaacattgggtgtttttgttttgtttttactatgaaaagacagcttaaggaagagctaaattctgttaaaatatttggggcatgtttgtgcactgctgttgtgaggatcagcatatgaaattgacatcatggttagtcatggtactgcagcttagggggctacacggttgctgtgtgagtggagagatgcagtgaggcagttgtcattattctaaaaattgtactactttcacttttcccaaagattatataatgttcataatccaccatgaaaacagcattggccaaaggtactgaggctgcttaaaatattcaattctgctttttaatttttaagtgaatttagtttgaaaagcatgattatacaggcctctcaggctgagtgctactttggtaaagttcccagttttcctgccttctgtgacaggatgaatgaggtgggtatggacagtggaggcagctggaatggcaagtgcagaaaataggaacagttctatacagtgctctcatttactaataacataatgccttctaaataatttttttgggaaactacattatcacaaaattatacaaatttttttacaagtatttacatactgtatctgaaaacagactttaaagtcacaagattataaatgtacatatatattctcacattctgaaaaataacattctcagaatccacagaaaatatacttagttactactgaagataatttttgaaatgtaaaaattagatttaaatagtatattttaaatgacagaactataattacagagatcagatcagataggtaaactgcaagatagataggatgaaacttttggcctactgtattacttacagagtttttttgtgtgtggtttttaaaactgttaaggcaagaagtgtcaaatgctttagagttaaataacagatcactgatttcaaagacttggtgtatagtgttaaaaattaaagcttaaaaggtggttagaaaagtggattaatgcaaaaggggtaataaagactgcaacattctcaggaccaaattaaactgctaaaaaaaaaaaaaaagttcattgacttgcttagtcgtatactcaaatgatgataaacctacatgtgcaaaggctcacgtttaagattgtcaagccagcagtctactgttgtgttgccattgcttttccattgggagaagaaagaattaaccagtcattaaaccatttggtaagttgcactttgctgtgctgatcccacaggaaaggcttgaaacacgagaagcagcaaagacagagcacacaagtgcataaggctgttgtcttcggcttgggtgaaatgacagttcctcttcattctaaaggtttactccattgaatttaaggcatttgttcattccagtgttgagatgctttgcatctctgcagaagaaatttattttaaattgtttaaatatctggaaatacttttagctatcatttataaagatagttttgttctcagtttcactataaattatagaacaaatgggaaacaagggtttaatttagttcagccattttacaaggaaataataaaatactaaaatctgattgttttttgctatttaatagccactgcccagacacatatttaagagtttaatctttcagttgctatggcttatgaacaagctaaggttgaccataaaacatttgttggatgacgtggtttaaaatgatcaccacaaaaagggaccacaaaaaaaggaaggaaatgagcatggttggcgattggaagcaagggtaccagagggcacagtgtgctttggcatgcattttatacataaaatgaatggaacaaaaggtgccagaagtcccaggttacacaatcaggagcttagatactgcacacaaaaataattatctgggttaaaaaagtaaacatagggcagattctatatggcctatcatgtttcttcaccttcccctcgttgctggctgatacagcgaggtggtcagctgatgactacttagtcaatatgacctttagtcgtgaaactgacagcagcagtgattaaggctgacttaatcaggttggccactttgaaggacagaaatgcagtggaaacagttttattctatgtagtttacatgcttaaggttacagagtttctacctgcactgtaatggaaatataatttctctgtagccaaaagctggcaaacttgacccagagggaaaatttaaaactgcagcaggctcaaatgtagagtatttttctttttatgggcaggttgttcagggatttttttcctcctttaatttattgactgactgtaaatacatgagtagaaacttaatagtcatgtatttcaaaatttggcttaatttaggagaatccactgatgaacaagtaccaacttacgtttcaagcttcttagccccataatcagtccttcagccacagctatttagagctttaaaactaccaggttcaatcactggttatgctttctgtgatgtaatttagtcatttctatttttagtattaaccaagtattagacacagaaaataggtattaagaatcttcatatatcctgtcagaccaaatgggattccaggaacctaaagcgatctattatgctataaagataattaacacattaaaaactcatagggtcaatacagcatcttaaacctcacacttagaaaaatatatttttaaatagcagtctacataattttcaatcttcaggaaactacagataggctagacagcgaattcctgaatgatgagtagtgatctttggcagcatttaaagtgaaaagaaataaggatctaagaattcagccctaatccactaaaaaaaggaattctaactgacaagtttttacaaatggagttgggctcattcattttggaaataaacctatggagtggcacacatctaaacaaattttcccaatagaaaaaaggctataaaaattttattccaagagtgattaaattgtataatgttgtatatgtgaatttaacacttttgtttacatgttaaacaaatgtgtatatattagactacattaaatatgcaattctttcttccagttaaatactgttgctccctaaaacccttacattgtacaccattgggaatgattgttcatcatactacttttccattagtgaggctacagttatgttttaaatgtgcgattacagagatggcatctgaacataaactgatggctcgaaaatgaaaatggaaatgtagcagccatatactgctaactttggatctgttcctgaattcaaaactactaggagaaaagtgtcctttataaaaaaggaccttattaatgcctaaaaaacatcatattctctaggaaagcttgtgtctgtttccttagggaaaatgtttgccttttaaaaactgtgatcctttaggatgatcatgactttccctttccttatggaaatgcaagaataaaatatttcattaa

SEQ ID NO: 15898 - DNA, 34281 bp, Homo sapiens
gtgagattccattatgttcttcttcctttacatgactctggtaacttttttgcttgcttttaacttttttaaagttgtagagatgagtaggagcttgctgggcatccaggcttatgtaagaagggaagaaaatgggaaaggtggtagagaggggcccctaggaagaggaatagcttgtgcagatgtgtgagtgtaaggaattaaggagagagtgggttgttagacacaatcttggtgatgtttctctggaaattaaaattagggattgatactgaatctaagcaggaattcagaaaagctattttagatcatatacaattcagtcacctctgtgttccaagcaaagtaaataactttaatcagtaatcaaacttttacaagatgcacatgccctctgaatattctgacaatttggactgatttgcatggctatcctcttattcatttaaacagaaggaaagttttccctcagtactgaggctctttcagaggatcaggaagtaaaaagtgatggtgaaagaaaacaaaatgttctaatggctagctgcaggcctaagagctcattaaatctaacagtgtacacactatgtgataaatagatcgaaaagtagataaatggatagatggactgagaacacataaatgaaactttgagtgattggacacatcgattaatatatttggcagcagagcttcaaagttttaaactggactttagccaccataaagtctagcaatccctttaaaacatatagatagaataagacctagccttaacaaaaatgtatattcctttagcttgaaatagatggacgcaagtctcaaatcaatgagtaaatgatttattaactcatacaaccctatatgaaattaaaacattataccctaaactccacttggtattcatttagagcatccagttgagcgtgaatttatggtggctgttcattacaacagtgaggaagatatattggttccaaattgtgatctatgtgcctttggaaaataggcatcatagcacgacttttattttactgataagtttgtttattattggctcactgactttcatagtctttttattgttctaagaagacttaagggtgtcttcatagtagaagttaaccatagcatctttatttggacatctgcctcaattgctagaaatgcatattctacttttctttttcttgatggatattttacttatatgtttttaacacagttactttgaaaaagtattttaaaaattactgtcatttgagaatcatagaatattctccagatctaatgtctgatgtagatgtattgttcagaaatactgttaggtcaactaaagtcagaaaatcacctaaaaattattagaaaaagttctttgaacttctgatataggaaaggaatgactgtaagtttttagtgatttacataatgaaatagttttcctgacattgactttaaagtttaaataaaaatatttattgcccaagtatatctcactgcacagcagtttatgatcatcagtctgttaatccttatgatgtaaggtattatcatctaactcatattttaatattcaattttaatgaggtaagagaagtgatacagcctacctttattcttattacaaaaataagcagccatttgtgaagatagaaccaaattttaggtgtccttcgggagtcagtggatatgaaaaacaattatttattgtatgagtaacatattaggctttgtgggaatttgacagtatgtatttatagtctaagtgattttgtaaaatatggctgcagtccgcttactgggtttttatggttaaaaccatctataatcctctgctctaccagctgagcagtaattgactgtattagttattttaaaataactaaaagagtagaattggaatgttcctaacacaaacaagtgacaattgcttgaggtgatgaatatccccattaccctgatttgatcattacacattgtatacttgtattaaaatatgacatgtaccccataaatatggtccactattatgcatacacaataattaagaataaaaaccatctatatacatttcccctttccttaagacaaacaggaaaagaatcacataataccttaagatgagtgaagttcactttgtaaatgtagatagtatgctttccccatggagtgatccgtataggaaaatttagcaaatgaaacagattttaaaggagaagtagtttaatatcttagtaacatcatattctattctattagtgggagcacaaattgttcttcattttagaaagtgatatggttctgcctaataaaagttaagtgcctatgtccattgactcagcacgtccacttgtagaaatctatagaccacagtgatgagtatgcagttcattcttactagagaagatttaagaaagtaaatggttaaagaacaatgattcttcttgattttaattcaataaatattggttgcataccaggccaaaaatattgtaggttagagctccctaatgacttgagattcaagagatcgacaaccctaaataattttcaatgaggacatctcctttttagaatattttaagtttttgattgataatgtattttccaaggcctgattcaattctctggactgaatgtattaaagaatgtctttcagaacaatgagaacatagggacacaaggaagggaactaactacacacactggcgcctgttagggggcagtggtgggggaagggagagcttttggataaatagctaatgcatgcggggcttaatacctaggtgatgggttgataggtgcagcaaaccaccatggcacatgtttacctatgtaacagacctgcacgtcctgcacatgtatcctggaacttaaaattaaatttaaaaaaaaacaccttttagatctgcttttaatagataaaagtgtgcacaaagataaagacagatgcaagttgctatagaaaatgtttggccacctgtataaaagctgtcatagggtcccagctgcagctagaagaaataacgctagcatgagtatcatctgaatcatatatctttatgagagttcacacacatatttctttttttcacacccataattccaatatgaccttcagttccacactctcaaattactaatgttctattcctttcatttccaattcaaaatattttctcataagagctagccaagatttgaggaatcaaacctttcctatgtacgcttccctcaaatacttgacgtattattatttatggtgtgatctcagtatatgtaaatcactatcataaaacatttaaaagtagacagatatttcctaaagcatacagttgtagaatttcaaggtagccttgccctagggtttttatcttattcacttattatttcttcatgcatctaaatatattatggatcacctaccataggattatagtaaggataaattaacatatggaaaatgccttaaacagtgcttggcacataataagcactcaataaacattacagtcattgttagaattaataaagcctgtaatagaagatgaagttgggatgatggcactcagagaagattaccttgagaatgggatgtttgtactgagctcttaaaagaagagtggagtatgtcacacagaaagaatggcaggtacaaagatcctgcaaggcagtaaggaacgtggcaagtgcaaggaactgaaagaagatgactatggggtcagagaagattcagataagactattaagacagatcagagccaaatcatgtagagcctcagaggtttttgatcttcagtctaagaacgtaaatccatggaagaattttaagcaggggtgtgccttgaccacattttgaattctaaactgtctctgggtgggtgtgggtgccaccaagagcatgtgttcatgtagggagactggttttttacagttgtctatgagagagatgacagttgcctggattatggtggtgacattggagataagcaggtagacagattctcagtgtattaggagagaaaaatcaataggaaatttaaaataaataattaactgtggccataggaggaaggagtctttggttggttctcaatttctgcatgagaaaaaaggtggactaaatcataaaaataagatgcagcaattggaagatgtaagaccatgcgtgcaattttggacatgtggaatctcaggtgtccatgaaccaacatcagctgggatattgaataggtatttgggaaaactggcccgtagttggaggagagttctagaatgaagaattattatccatgcatgataattaagtccatagacatgggcaacatcttgttcacaactaagatctttatcaagactctagctacctttgcaattcataatctatttgtaaaccactagtagtttactaatcaattgggcagtatctctccattcttcaggcttttaatcccagcatagaatcataagctattcatgctggaaggccttaaatgtaacctaattcaagcctttcatcttacacctacacttacatcttacttagtttccttactgaggtccaaataagtcacactcctctcctagggcacacagactaaccacctattctttaggcttctcttgtccccatacagaccttccttttttagctaacacagttctttaggagttattgttaatatgaaaccaacgacacaacagcttctttttctattcctttcaaaccttgctcttcttgctttggaccaaggacatggtttttctgttaagatgacttgtacaattaggtaattcaaggaatttaatgatgcctagcatattacctctttgatacagatcttgctatattttagactctgcttgagtagaaattgacaaaagggactatgcctctagttcattatactttttctttttaatacttctcaattaaggccagacgcaatggctcaggcgtgtaatcccagcactttgggaggccaagtcaggcggatcaccaaggtcagcagtttgagaccagcccggccaacatggtgaaaccccagctctactaaaaatacaaaaaaaaattagccaggtgcggttgtgggtgcctgtaatcccagctactcgggaagctgaggcaggagaatcacttgaacccaggaggtagaggttgcagtgagctgagatggtgccactgcactccagcctgggtgacaagagggagactctgtcttaaaaagcaaacaaacaaaaacttctcaattaagagtcttaaccagggtcatctgcagaggtacttaaagtcacctgttttccctttccagcggtcagcctcaccaggacagtggcatgttgttttgaaatgctccccaggtgatgccagtacatcttccattaagaaccactgccataatgctatcacttttttttttttttttttcagaaaaaaaaaaaaaactgccagctttctttctttttctttttttttggtttttgttttgttttgttttttgcttcttgaacattgttaaaccaagcataagaatatgatcaatgtggttctttttctgtatagtgatagtttcacattttcctcttcagatgaagttccccaaaatccaaattgacaaactgtggcttcatctgtagatggtggtgacactggttttgtgaaacagtatgcccctcataaattagtcccttcaaagttcatttccaataaaaattcattttgtattcactacactgccttttcttctccttttgccagccttgtgttatttaacaaacgcatcattaacatgagcactgtaagactgtcagattcgatcataaaacttttatgcaaccttagaaatgtgtaaaaacggtcgggcacggtgcgtcacacctgtaatcccagcactttgggaggccaaagcgggtggatcatgaggtcaggagttcgagaccagtctggccaacatagtgaaattccatctctaccaaaaatacaaaaaattagccaagtgtggtggcaggctcctataatcccagctactcgggaggctgaggcaggagaatcgcttgaacctgggaggcggaggttgcagtgagccgagatcgtgccattgcactccagcccaggcaatagtgcaagactccatctcaaacaaacaaacaaaaagaaatgtgtaaaaaccctattagcccctcttttttccccagtatttgacatcctggtaatagtgtgtttagcatcagtaattcatagcatcttgacagtgaatataatattatgctgtgaattgaaacaactttccatttgtgttaaacatttttttttcttactaatttcctataaaatgaatctgtttcaatttttttggcatggtggcacaagctaatataccatgaggttactattaataatgctacagtagaaaacaatgttgtatgtgttactaatatctacagacccattggagataaagataaatgtacataagtcaattaaaaaggaaaatgaaagttggaacaaaaagtccacataaatctcatcctgtgaccttattgccaaataactgcacatatcttttgctaacacttaaataaatacccagtgtgctgaatttgacacctggagaggattctgtccacctgtcatggaaggatacaagagcttcttggaggaagtttgccatttatgggacatattctttgagttcgccataactttttaattttgatgcctaggcttttagccacagacttacaaatcccccacttggcaagacttgctacccaaaccttggttttttgttttgttttgttttcctatagtcaaaaaatgcttcttgggaagccagaaagacaagaaggaggactcaagattaggtttgcaaagatgaaggaaaagcatttcagggagagggaatatcagggaatgtgtacaggtcctaagcagggagtatggcttcttcaaagaattgaccaacaagactgggtcataacgagcaagcaagagaatggcaccaaaataaactggatagcaggccaatgacagaacatctcaggaccttatacaccaggagaattttggacattatcttagaatactgagaagccttcaaagggtaataggatgagaatgacattatcagatttgtgtttttaaaagatcagtctggctgcagagtggaaaattgattacagacagacaaatggtgatgaagggagaaaggttaaaagaacttagtagcctaggcaagaaataacgcaaccttgatggtgacagtggatatagagaaacgagatattttggaggggaatggcaaggctgggtgattagctggataatagatgaaaataaatgctttagaaactggaaaatacttagggcaagaggaatataggatccgaaacctcactgtggtctacttagcaacataattttaggcatgtaaatctggagaccctttcctttgctctcaagttaaatacaacagtcacataatgagcacagtacttagtattttctgtaatttatatccttatttgaaaggtaattttcattccttcttgaacttaaaagacttctgagaaaggtgtttctgaggttgtccatttaggtctgaaataacagaacaagataaagggggaaaaacatgtatctctgataatccatgggacttatattcttattctagaactcttcattgcagtgaacacatgaaaccaacttggagttttattcctgtttcaagtaaatccacttaaaatagcatctgcataaacaaatgaaataaactatccaggactgtgacagcaattgactggaatcagcgtctggtgtattttcttataataaagaccaagaaaaccttacagaaaatataaatatgaaacaaggcccctaaaaaacttaactattctttaattaagtttgtatgaaacgaaaacaattcagctattaacacttaaaacactctggtatgttaagttggagtatttcccatcatgttgtaaaagcacgttacataaccttgctacgtgttccttgtctgaatagtaggaaaatacctattgctatggaccaaatgtggtttatttaaaaacaaagcataggggctgggcgcagtggctcatgcctgtaatcccagcactttgggaggccgaggtgggcaaatcacgaggtcaagagatcgagaccatcctggccaacacggtgaaaccccatctctactaaaaatacaaaaattagctgggcatggtggcatgcgcctgtagtcccagctactagggaggctgaggcaggagaaacgcttgagcccgggaggcagaggttacagtgagccgagatcacgccactgcacaccagcctggcgacagagtgagactccgtctcaaaaaataaaataaaataaataaaataaagcatagcaaagaggttaaaagaacctcttcagtgaaagtaacttggaaaactatgattttgattggctgggtgtttgggtggatggatggatggatgaatggatggatggatggatggatgcatggatagatggatgaagggttgctattgataagagaaggtagatggtgctgactaaaggaagtttttttagtataattttcatcctggaacttaggtatatgtggcaaaatttggcaacaccttgttgctatccaagagttggtgatttaggaagcatccaagcctttgtttcttcaaagtttacttctactcatggctacagcatgattagcaataccttctatgggcatgctagtagacccagcagttcaagcctgcaggtctctgggcataaaacaggtcacatagtgtttaggccatccctcagtgactcttttagattgttgtgtggtgctaataagatagtgttttcctaatattagtaagtaaataaataccaaaaaatataggtcacatgtctcttcaactgtaacatccagattgtatattgattaaattagaagactagaacaatgaaataatgtatcctgaacaacctggttttagtagctgaaagtctgcaattgtgtaagttctatacagcttaggaaatcgaagaatatagtactttagaaaaaacatttatgcacatttgtagttaattattttaataaacatttttgaaagttgcagtaggctggggtattgagatttaaaaacaaacaaacaacaacaaaaaaaacagccttcctcctcatggagctcacagctatgagggagaaaaatgcagatacgtaattgcaaaacagtgtaatgaaggctgatagatgtatcagagcatgacctggcataattcatttccccagggccatgacagaaggcttcctacatgagagtccttaaaattctcattattttggatccttttatagtgttctttaactgcataaaataaattttataaaagtacaaagcaactcaattatattgaaatacaggtgccagaatacttttaaaaataaacttgttatataaaagtacaaggcaaatcaattatattgaaatacagttgccagaatactttaaaaaataaagttattaaatagtaatgtatgtacttctttattaacacattaagtaacaaatatagccgcaagtctaataccatagtttcaacaccatagtgaatgtaaatggtatttggagatttctgcaactaccttaatgggatatgaaaatatgtgacttctgttgttgccagtagtttactgcctaccttcctaactgaaggaaatgctaaatttcagtaaaaggttaatgaaatagagatgtaattttcttttcatccaagtttacaggccccatattaaggacccgtcacagaggagggagcttgatctgatttttcaatggtgagttggagtttctcagaccaatgaaaatggagaagccacccaggcatgacagcgaactgtgcaaaagcggaaaacagatttgcccttcaagaaaattataaagcttgatactgctggagaaagggccaccaggcacaggatgatgcagaaggagaggaaaggccttggatactaggtcaaggcttgagtgaggaagggaagccagtcaacagcatcaagcaaggagggtaccatgatcaaagctgagctttacaaagagttttctgtgtgagttttgggatatagattggagggagaagagtctggcagccccagagagagattgtgagagtctgagattatctcatgatggtaagcatgaagacaaagctatttttggaaatattacaaataaatgttaaaggcaaagtatgagggaaaaggcgtttgggcaggcagttcaattttatgaatactcagtgccgattatgtggccccagccaatatacctagcaggatggagggggcataattctaagcaggctttttattttaaaataataatagtttctgttaactaagctcttacaatattcaagtattattcatattctttttgaatattacctattacccttaaactttcctgaggaagatactgttattattattattattatccaattttacagataagaaaactaaggatcagacggattatatcatttgcctaaagtgatgtaactggtatgttgcagagccattttgttctgtccacctgcctcccttagtcaagctaatggcctttatttttttttttgcttatgtcaatactatccaaagcctgtgaatattgtaggaaatgctaagtatcagttacccaagaagcaaagagaagagttttaagcccctcatattgaagggctaggtatttaaacactaggattttattttaacaaaatactgccctgaaaatcaagtaccaaatgatgaaaatcactaaaacaagagtttttaatgaaattttaccctcactacacatgccatttaattgaactaacataaaactctttcagaggtatttagtggccaaagttccttatgtaacataaatgaaattctgggttgctgcacagattcctaaacagatatagattatgggattattttctttaaatttacttctgatcacttcaccttctcagcaacccagatactggcaaagtggaagatagcttgatgaaacaccaggctgtagcagtctgactaaagcttttacagatttctaggaaaattacttaacaaaaaaaaaaagaaagaaagaaaaggaaggaaggaaggaagaaaggaaggaaaaagagaaagaaagaaagaaaagaaaagaaaggagaaaaaaatgttgcccagcttagaagtgagaggactaggtttccaaatccctgctttaagaccttgtcacaattaggagcaattccctttttttctcccaggcttatttttgattttttttttaaagagtgttagaattttggggaccctgagaaatctgtcataaagatagtatatcataaccactgttatctttccaaagtattgccaaacagcacttagatcacccacagtggttcagccttctgctagtaagatgagatgcctttattttccacaaaggatatcaagccctgaaccccacccagagagcaaagaagacacagaggtagttgcttgcaagtcaacaccattctttgtgagcgtaactaggcaatggctttgttactggtggaggatcttgaatatgagttgtccaggttcttggcgttttgagcaaagaattggacaaaacatacaaacaaagcaatgaaggaatgaaacaacaaaagcacagatttactgaaacaaaagtaaactccacagaatgggagcagactcaagcaagcgactcaagagcattggttacagaattttctgggtttaaatactctctagaggtttcccattggctatttagtttacaccctatgtgaatgaaggagtggcccacaaccagtctaattcgtctcggaaggctaccaatcagaggctgatgttacaaagttataccgctatgcaaatgaagacgaggtcacaaccaatctgattggtttcaggagaggaccaatcagaggtactttccatttttcatctgcaatgcagaaagggtggaggttacaaagggagtagcctctgatccttttgttccttgagcgtggaaagttggggttttccttttgatttagttctagaagtcagcatgaatcagccttaggttccctgcctccagaccctattcttcttcttcacctagatattctaaccttttgttaccttccaagaaaaaatgattggtactagcaatgggcagccacaggtttgttatcttctgtgagtcatgatcaatgaacaagtcctctttattctctaagcaatgctaaaacactaagcaaaccagtaatttcttgacagatttgtcacaggaattttgtaagcactttacatttgttacactgtagaaagtacatgtggattttagtcttacaactgattacagtcataatttgtgtggcagtgtttagacaactttaggcccataaagggaaatctgaccagcatttctcagaacaataccagagacgggtccatctttatttctcccttatggactcagtttgaaaacacggattcatgtgactggatgtctgatcaagatgctgttatttaccatgctagttattttatacaaacctcataacaagcagtattagataattagaaatcactttatgcatcttaaccttacccagcctcacacacacctgtgttttagtcctttctaaaccacaaatcccctgcaactgaaaatgattccataacattttccaacattgcattgttctgtgatgatagggtataaaagatatataagacattgttcccatcctcagagaagtttcagtttgtacaaaagaaatacacacaattgcctattatttatattttagcacaagggaaaataatctcatttttaaaaattcttgacacagggaaatagatggaaaataaattttgaaaacttatttttaaaccatgtaggagtacttaatttgcagtgatcaatgactcaaagctcagcatgtcttaaatattccatattgctaagcagctgataatacaaatccatccttcattccgctgcttttctcttgatgtatctagcataattggtgttttcctatgtgtgtatctgaattgcatatttcacagttactgtagaaacctattactccttggcatttagcatggatgataatgttgctccttcagtaattttagcctagaccaaacatttttgaaatggtgttgtacattagggccatcttgcttatagattaataaaatcactaacctttacactaaaaaaagtgcactgctcatttttaataattatcaatatataaagttattgtcagttaagagtcagaatgcattttttaattctcattcttccttttgtttttcttcagcctaatatgatttttatgtcataaatccattctcattagtcttcacaaacagaaaagttatttcataagaagaactgagtagcgtttttctaatttgtccattttggaaacaaatgaaatatttattttaactgattagtgtttctataaacatttaactttggctggacacggtgactcatgcctgtaatctcagcactttgtgaggccaaggcaggtggatcatctgaggtcgggagttcgagaccagcctggccaacatagtgaaaccccatctctactaaagatacaaaaattagctggatgtggtggcgcacacctgtaatcccagctactcaggaggctgaggcaagagaattgcttgaacccaggaggtagaggttgcagtgagctgaaatcgcaccactgcactgcagcctaggcaacaaagcaagactccatctcaaaaaaaaaaaaaaattaactttgtggggcctaaatattcagctcttcctgatatttcatttttatcattgtaaaatggatacattattatggcgatagatatcttcacaaaaattccgtgtgatataataaacatttgaaattgaatatagttattcacttcctaaaacaacaaatcttggcctgtgtaatcaaatttggcaagaatatattatcatccttattcatatatgttttacaattatgtgttgtgctatagctaaacacataagtaaatatcaataaatgaatgtgtaaatttttggcaattaccgtatactaatgttggcacagatacaattattgttaactttattttcatgttcatataacttaagtgtgtatgttttggcttgctatatatgactagagtaaaattcagaaacctaagcatcctaagttagtattattgcttgttatagctggaatttcagtgtatactaaagtgatcttcttttcttatgcaaactaacaatgagtgccatggctcagttcaactgcagagcaattacaagaggagttaatgctatactttctttatatttatctttttaatatccggaggctgccttattttacttaatacctagattgttgaaaaatatatcaatacaatagaaaaactcataatttttaaaactcactcatctaattatgcattaaagtactaactccttttcggttccagtagctacttatggacaaatccactgactcctttattattgtggaaggcttcccaaggctgaggagaaaggagttggttggagtcaagcaggccaaagcagggaacatgacattgcagaaagagggatagcatgtgtgcagaagaaagagagagcttaactacaatttgagttgccttttcaagaaaaatgaggaaagacacagaatccatagattttaaaccataggattaaagtaaaattatatacactaataacaaaaacagaagaagaaacaatattaccctgaaagagtattttaaaaaacaacaacagagctttgaaatctcaccagaaaaaaaagaagggagtagccatataatgcaaaaagtaaggtaggatttttatgaccttgaaatattaaagccttaaaagacagagacaacaaattgaacaaatactagaaaaggctaagaaatctacacataaatgaaactcaaataaacatgaatctatgagattccaagagagacaaacttggtaattatcctgtcagagagaaattggagcaacagaaattgtagcactaaacaaagaagcttaactgctcagttactctataaggaagagtcacaaaggaacaatttaccacctcagtcagagaagcactgagttaagatagaggcagtcatgagcacctcaataaacagcctcacaaagcaaaacaaccttgacaagctagaaaagtcatcatccttgacattactgagcttctgtctcacaaataagaggcaggggtcagccattcttcagtgggtgagattaatgggatgaagcattaactctgagacttttaggtcacctttcatgctgtccaagtaacttggaggaaccagtgtgctcgctaaatgctgcattcaccaatgcacattgagtcactgggagaatcagcattaccaatttgcaatcatatatatacagatactgttagggactctttcccacttgtttttctttttttgaatttttttttaaatctttattttaggttttgtggtacatgtgaaggtttgttatatagacaaacatgtcacaggggcttgttgtacatattattacatctcccaggtattaagctcagtacccaatagttatcttttttgttcctctccctcctcccaccctccctgctcaagtagaccccagtgtctgttgtttccttctttgtgttcataagttcttatcatttagctcccacttataagtgagaccatgtggtatttggttttctgttcctgtgttagtttgctaaggatgatagcctccagctccatccatgttcctgcaaaagatgtgatctcgtccttttttatggatgcataatattccctggtgtatatgtaccacattttctttatccagtctttcattgaagggcatttatgttgagtccatgtctttgctattgtggatagtggtacaatgaacattcccatgcatgtgtctttatggtagaatgctttacattcctctgcatatatacctagaaatgggagctgggtcaaatggtagttctgcttttagctctttgaggaattgccatactgctttccacaatgggtgaattagtttacactcctaccaacagtatattagcattcccttttctccacaacctcaccagcatctgttattttttaactttttaataatagccattctgactggtgtgagatggtttctcattgtggttttgatttgcatttctctaatgattagtgatatggaatttttttcatatgctccttggctgcacgtatgtcatcttttgagaggtgtctgttcatgtcctttgtccactttttaatggggttgtttttcttttgtaaatttgctaagttccttataaatgctggatattagacctttgtcagatgcatagtttgtaaatgttttttcacattctgtaggttgtctgtttactctgttgatagtttcttttgctgtgtgcaagcttttaggtttaattagatcccacttgtcaatttttgtttttgttgcaattggttttggtatctttgtcatgaaatctttacctgttcttaggtccaggatggtattgcctaggttgtcttccagggttttcagagctttgactttcccacttttcattctttcatttggcacacattactgaatgctaaccatgcaccaggtactgcatttgtgccaggtgttaaggaaacaaagcatgagatatagcctctcatcagaagtaggaaatatcttaggtttttatttacattttgaacccgtacacaagtatatatttagagagatgttggagacttgggtagacttgctttttcagaatatattcaaaaataagccaaaatattttttaagcatttgaaaaaaatacttgtaccacttggaatcatggtaggctgtatattacagaagaacccaaaataacagtggcttaagcaaggaagaagtctttctctctctctgtcatgtgaaataaactcaagggtaaggagttggggaccaatgtgctacatctagtatcatcaggcatccaggctcctatccttttactgtacccatacaaatgtctttcataagttcaccacatgggccagggtggctgcaggagttctaccagcatagcattcctgtgaagcaagccagaaggaaaggcagaaagagcagctcttcccagctgaatcagctccctttgaagtcttcctgaaatcccatgcaatacttctcattggacagaattaatcccttggccatatctagttgtaatgtgaactgggaaatgtattcttttgtctagcagtcgggaggagggaggtggagccacaatgtgcccagttaggaatcacatttctcttaaaaaggaggagggaagaatgaatgtagggataggccactagcaatctttgctacaacagtacagctaggggatatgttaattttatgagacatttatgagtggttctgcttgacagcaggaagtacaaatcaatggaccaaatagggattcacctactttcacgatttagttctctctgtgctcattagaagtctaaagtcaactttgcaggtgacaagaaatgtggttgtcttaaatatttaactctagctttgcaaagtaaaaggaatcattaatatctctttcatttgtcctgtttccttggcctttgaaaccagtgaaacagctaccttttgttgtgtttgttcaaaatgagtgatctgaacaaatgagtgatttccttatcttttcaaaaagaatggtcacagtatctgccatttattatatagttaacattgtgtggatcactttactaagagctttgcatggattctcttttatccttcagaaagactgagatagatgctattattttccccattttaccagtgacactgaggcttaaacaaattaagtgaggctgggcattgtggctcatgcctataatcccagcattttaggaggccgaggccagtggatcttttgagcctaggagttcaagagcagcctgggcaacgtggcaaaatcccatttctccaaaaatacaaaaaattagccacacatgttggtatgtgcctgtagactcagctactcaggaggctgaggcaggaggaacacttgagcctggaaggcagaagttgaagtaacctgagattgcaccactgcacccaccctgggtgacagagtgagatgctgtctaaaaataaaaatgaagaagttaagtgaattttagaagatcatatggtttagcggacagcagaaccatgctttaactgagaaagatctttctctagaattcagcccttaaccactaccctcttcattttgaaatttaccaattaaaatgtgatgctcctattgtccaagggagggtgtaatgtaccctttgggagtggacagtaattccttatggtcaaaggtgaataatacctataaaatacctatgttgatatactttaaagtattcaccaccttggtttttctagagcagaacaatgatcttatctatatggttctgaatgtgagcatagttgaatattctaagatgaattgttgattttattttgttttgtttgggcaattgtttttaaggcctctgttacacaggtagatgaacatgagaaaaatcattgaagacaagaagcaaatacagatgagcacttacaaagtaataccctttaggcaaattggagtatatctgtacaatcatatgagaaaatgaagtccattttgaaagctgttcttttctaagcctcctcctttagttagtgagatgaattatccatgtgaacctgaattttccttgaagaaaaggaccactgtgtgctaacattggtattttgacccaccccaacaccacttccctaattcctattggtttcattcaccttgatttaattttatgaaattttgtcagtacagtagggtctagttgtgagagcaaatgattacacagagttgctggcatcagaggacatgatgctatctagggggatgccttcaagctatctcatttcgtctgtgtcacacaacacaacttccaaccaaatgtcattctggggctccaggggctgattgtttctttcacccttcagtaaaaactcactttgtcctccacattcacacatatagtttttcatgaaaatcagaaaaccttctaaccaactatgcaagaactgagaaggaaagcactgtaagttaaaatgtgtttcttcctttgattatgttgtccctgtttgaaacacttataatatgataagcctaatgccaagtgttatagtgtttgacaaaaaatgtaaaacagatttggttaccaaggttctttcttggtgcataggaagatacttgggtaacagatacagaatcattaattactgaagcaaaatagcacaaatgggtcccaaaaagagagtcaattttaagaagtatttcctcagatgcagaaaaaatatagagtgctcactttaaaataacctaacctatattttatatcaacataaagaaaatatattaaaggcaacgtgactgcccatcacaaagaatgcagatactagatattcaaatttcaagttgtgataccccaaacagtaaaaagtaattagttttggataaaagttcttatttctaaatttataacttataaattatttttaactttatcaagtggtcactttaatttttctttttattttaaaagtcatgaatttccattagtccatattaaaaactgcatagtctcttaaattcaattgatctaaaaatgagtatttctaaagcgtattctgttggagacagaatccttgtaatatttcaagcaaaaattaactacttaagaaactaagtaaatttttctttctttaggtatttctttatctttattttaatttgtcagatgagggaagaatataatttccaaaatccatgaaaagctcagactgagttgagtagagaccccacttgcttctttcagtccacttgaagtagcattgaaagctgagtgtatgactataaatccagttgtgtttaaatgagtttgatcttcatggatactaaatacaaaacactttagtcacagatacctcactttcttgattaattatttatattttatatgttatgaatgctttcttttctaaaaagaacactgagttgcttttgaacttttattttcgaactctgaaaagtttatactaaaaattagggaatatttatgggtatgctactaggtatggaaggatatttatgagcctcttagtataagaactttatcgttacattttaaaatagtacaattctaattaaagaatatgtacctcagtgcagtgcttacattaaactttgactccatagctgttactatgaccctaaactgtgaagttaaaggactgtctatctaccctatgccttgaaatttttaaaagttctcaataagtagaaaagctagtgttaggagtactatttagaaatcagcacctgttatcaggtaacacaactagttaactatattggaaggaggcatgtgtgttgcacagctttttagggacacatcaatgtttatacaaatatgaagagagaaagtaaggcttatgtaaaggagttttcagacagtaatgatgagccccaagcaaaactgtgttcttaccttatttttatttatcctttttggtaaagctctatgacctacgtgtggagtgtgtcaccaatataatgatcagtttgtaatgctttggggggaaaaaagcatactgataacttaagacatgtgccagtaatcatatactatagctcagaaccaggatgatatagaaataagttgagctggtatagcagccaggataggataggcattactaatattaaaaaacaataacaaaatctttgtggtttaaagcaacaaacaactctgcttatatctcagatatccaaagtaatagagcctccaccattctgggatgccacctctcacttcaaggcttcaagatttatcacagaggtgaagcatagagctggagagttgagcactagcaataaatgctttggcctacaactattatttcatactctcattgtatggccacatctagtcacttggctacccctaacttcatataaggaattgtattataattctctatctaccttgaaatggagggcaagtagatattggtgaacattatttatatctttcacaatgtatttgctgatttatttggggccaagattccctattattctttctgcaaaaggccatataaaattttcattctgctggctggatcactactgtaagaagtattaatgacagataggcttgtcttagaaaacatcttctcctttggtgatgcccattaaaaatgataaaattcttcaattaacaatttctagcactgatttggaaaacctgactcattctgtaccagtatcattggtcaaagatcaagtacgaaaaagtgtgcacaaacgagtctgtcagtttttcagaaagttaatataaatatcatatgtatagttatatgacccagcaattccacccttgggcatatacccaagagaactgaaagcacgtatctactcaaaatcttctacacaaatgttcatagcaacagttttttttataaaacagcgaaaaaacgtagaaataacccaaataccccatcagctgacaaatagatacatgaagtgtgatatatcctacagtggaatattgtataactgtaaaaaacatgaactactgacaaatgctataatatggctgaaccacaaaaacatgctgggtgaaagaggccagaaacaacagagcacattgtataattacattgatataaaatgtccagaatagcaaatccatagagacaaagagtagattcgtggttgccagggggtgatgaaaagtgggaattgggaagtaaaggatttattcttgagcaatgaaaatgttccggaattggatagtggtgatgcttgtagaactctgaattattgaaatttactaaactgcaagctttaacattgttaaaatggtaaattttatatgaattttatctcagtaaaaaatttttaaaaatatgtgctatagtgagtgatcaccacttttccacgtagaactttctgcctccattttactggggagtgtaaccattgcctcctactgtatcttcacaagacaatacaagtttccaaatctatcagagtgtcacatgttagtcactatgctgatcagttttctcaatggcataactttacatttcaacaaactaaaggctgagtagaaaaaatatctgatttgaagtcagagaacctttattagagacatgagcaagtctcttagctttccaagctttgttttcttcatctgtgaaacaggaatgctcctgcatacttcaccaggataccggaaaagaccagatggtacaatatatgttaaagtactttctgtatttctaatctggtcttctacttttagttttagcttattttctttatattgttcagcctgctttcctttaaataaacttcctgtaaaaatctgaacattggaagtcaacatccttaggttggaaccccagctctgccacatttcagttatgtgaccttgcttaggtagttgaacctctgtaaatctgaggtttttctgtaaaaagggaaataaaaagcctccctcatgatgccaatgtaagaattaaatgagaacatgtaattatttagtatagcctctttgcatggtaaactgtctgtgatattagcacaataaggctcatgataaaattcaccctcaaaaatcttcatagctacaaatactagtcgacttacttggtctgtttgcaaacctaagaatttcagtctcttaagtattccttctaatttttctattctgtctcttcaataatgaataatgtatattgtcaccagagaagattagttactgtttttttctctgaaaaaagcatgttgcacactaattagattatatttgtatgtgttgattatatacaaattatatgcaaatctgattttactctgaaaagtatcaagactgaaaaagttatttatacatgtatgtatatatattatgcacacatttatttacctatatacacatatgtatatgtatatagatatacatttatatacatgttatcttacacatgcaaaattacaattgaggtttttaactatgttgatcaaacattcattcagtgtaacagaaaaacacttaacccccactggagttgacagatttggcaaatacagctctctttttcttccttctccattagagagttcattggtgcattttgttcagatgaaatgcaagaaccaacccaataattcattaaaaggattagacaatcagttgctagaaattccggcctaaaataccaatatatgttaaatcgcaaaagcaaagaaaaaccattctggctactaggctaaattgctgcctttaacagtgctagagccaaatgctcaatctgggcaggagcctggttgcttttaaacagtagacctcactactataaaattttttgcatctaactcaggagtcagttgaatcttagcctcaacgtgtaaggggaagaggtgagaaatatgactcttttacagagttccagatggtcatgtatggatttggtctgagagccgtgaattgtaaggaacaattcatggtgtgattcaagcttcaatcttgttatcttcatggactgaaatggagaacgaggtgtctgatggaactacagagaaagggaactaccaaatcttctatcaatataagtgacattcattcatctcattacttactcaacaggtatttattgagcacttatgtatcaggcaacatggaaatctctaggaataaaagctgtacagggtcttgagaaggtcacaatgcagtaagggaaagcaaacacagcatgaagctgttaagaaatcatggaatgcatgataataatatgagcgttttgtgatactctgacagtatagtgatgcctctgattctgctggggtcaggaagttgcatagaggaacatgagtcttgaagcaaaggaagtataggaaagataaggtggaaagtaacatccagagaaaacaatatgaggaaaagcatgagagcatgtcatattctaaatcctgcagtctctttggactggctagcacccacggcacctatggagaaatggcaagtagagacaggcaagatgggcaggggctaaatgatgccataaaaggagtatgattttcatcctataggcaatgggaagctctttaggatttaaaaagcagagaaatctgatcaggttagatttgaggcagtgtagagagtggagtggacagagtctagaagcaggcccctttagaagactattggaagagcccagctgagagatggctgggataagaatggagagtacaaggctgggcgtggtggctggccaacatggtgaaaccccaactctactaataatacaaaaattagccaggcatggttgcacgtgcctgtaatcccagctactcaggaagctgaggcaggaaaatcgcttaaacccaggaggcggaggttgcagtgagccaagatcacaccattgcactccagcctgggtgacagagtgagactctgtctcaaaaacaaaacaaaacaaaaaaaaagaatggagagtacaggaactatacatgcttgagacatagaattgatagaactggtagctatttaaatatgaatgttctgcaatcatgctcaggtttttagattgggagacacaaaaggaacaataggtttggcaagaaagccaaagattgagctttaggttgttgagtttgagacacttggaaaacatccagataactgggcaattggaagtgtagttctggcacttagagaagagaaacaaaggaaagaaagaggtcatgggggctcagtgtattggttatagcaatggtcatgtaaagttgatatttcccagcaaagcaatgaaagtagatggcccagaacagaagcaaaggagaaagaaaagatgaagatgccactatctgagaggtgggagaaacaaagggaatagtgtcaagcagcacaagggatgagaacattgtaggaaagagggaaaatttttagaaaatcttatcaccaaatgataatagtatgttggaaaagtgctccgagttacccatgagacaaccaccagcaatctctgggagagcagctttaatagagtggagaggataatttgcttcatgaaattagtaccagtaggcccctagccttttaaacttgtttccaactatttactcacgtgtctaagatttttttttattctcatgagtttcctacttacatggttaaacagggagaggaaatcaaccgacatctatgctctggcagggaaagaaggcaggtgttccagagttgttttcagtactgatataggaatctgtccttcacgaggctccaagcaaggcatggagtcgctgtcccgactggtagtggcggtgttctctggtaaaccagattccaagtcacctgctgaagctggtgagagcagtgaggaaggggatagtagagtatggaagtttgggaatagctgttaggggaaagagagtgacattattgcacaaaataggtgtcaattcatgcataaagaaggagtgagtgagcacaattacctgcagaaaatgaaattggacctgtggccatggatcattcctacatctgtgtttgccaccattgattttctgaaatttagggcattctagagacaggcattttaagatcaaacactgttcttagtgctccatctcattgagtttaatgagacatacttaaaaacaaatggaccgttttgcagagggctgagttcacacccagcttcacagagtagaaactaaaaatgttctaaattaactcaaatcaatttttaaaagattttctgagctgagagcacatttggccaagaccctgggtgccacgtgaaacatataaacgattgattgaatgaaaataggccatcctttctcttccttagacactaagcagccttttgtcctgctcttttttactttaattggaagcatttttaggttttagagccagttttgttctaaatatatgaatacttacttttcccctttctgaaaagtcagagattttctccctttcttttttttttttttaatttatttttttttattatactttaagttttagggtacatgtgcacattgtgcaggttagttacatatgtatacatgtgccatgctggtgcgctgcacccactaactcgtcatctagcattaggtatatctcccaatgctatccctcccccctccccccaccccaccacagtccccagagtgtgatattccccttcctgtgtccatgtgatctcattgttcagttcccacctacgagtgagaatatgcggtgtttggttttttgatcttgcgacagtttactgagaatgatgatttccaatttcatccatgtccctacaaaggacatgaactcatccttttttatggctgcgtagtattccatggtgtatatgtgccacattttcttaatccagtctatgattgttggacatttgggttggttccaagtctttgctattgtgaataatgccacaataaatatatgtgtgcatgtgtctttatagcagcatgatttatagtcatttgggtatatacccagtaatgggatggctgggtcaaatggtatttctagttctagatccctgaggaatcgccacactgacttccacaatggttgaactagtttacagtcccaccaacagtgtaaaagtgtttctatttctccacatcctctccagcacctgttgtttcctgactttttaatgattgccattctaactggtgtgagatggtatctcagagtggttttgatttgcatttctctgatggccagtgatgatgagcattttttcatgtgttttttggttgtataaatgtcttcttttgagaagtgtctgttcatgtccttcgcccactttttgatggggttgtttgtttttttcttgtaaatttgttggagttcattgtagattctggatattagccctttgtcagatgagtaggttgtgaaaattttctcccattttgtaggttgcctgttcactctgatggtagtttcttttgctgtgcagaagctctttagtttaattagatcccatttgtcaattttgtcttttgttgccattgcttttggtgttttggacatgaagtccttgcccatgcctatgtcctgaatggtaatgcctaggttttcttctagggtttttatggttttaggtctaacgtttaagtctttaatccatcttgaattgatttttgtataaggtgtaaggaagggatccagtttcagcttcctacatatggctagccagttttcccagcaccatttattaaatagggaatcctttccccattgcttgtttttctcagctttctcaaagatcagatagttgtaggtatgtggcattatttctgagggctctgttctgttccattgatctatatctctgttttggtaccagtaccatgctgttttggttactgtagccttgtagtatagtttgaagtcaggtagtgtgatgcctccagctttgttcttttggcttaggattgacttggcgatgcgggctcttttttggttccatatgaactttaaagtagttttttccaattctgtgaagaaagtcattggtagcttgatggggatggcattgaatctgtaaattaccttgggcagtatggccattttcacgatattgattcttcctacccatgagcatggaatgttcttccatttgtttgtatcctcttttatttccttgagcagtggtttgtagttctccttgaagaggtgcttcacatcccttgtaagttggattcctaggtattttattctctttgaagcaattgtgaatgggagttcactcatgatttggctctctgtttgtctgttgttggtgtataagaatgcttgtgatttttgtacattgattttgtatcctgagactttgctgaagttgcttatcagcttaaggagattttgggctgagacaatggggttttctagatatacaatcatatcgtctgcaaacagggacaatttgacttcctcttttcctaattgaataccctttatttccttctcctgcctaattgccctggccagaacttccaacactatgttgaataggagtggtgagagagggcatccctgtcttatgccgattttctccctttctgaaaagaaaggctagagattgaaaagttaaatatttcttctctgcagctagtaagaaaagaaccatttggttctaactgtacttgcctggactctaatttcctctatttgagtttctaatatatctgcattcagttcccccagcactcacatcccacagtagaggagcatcattggctattgtctaatttccccaagggaaaggtgtctacaattgagaaaaatagtctgaattccaggcacacttatttactacaaactctctaaatattgtaatgtccttttactatgaaattttgcaggctgtgatttcaaagagagctctttctttctctggcttttctgtgtgggcctcaacgaaactggcccttgctgctgttgttgctttctgaaagtgagttatcaaaattactaaccaattccattttgggtgttaatcaaatatttgtggctttcaccacgtggcaatttaaaaaccaggctcagcttaaaataccctttgacaattggttttgccttctttttatttcattctgaaaatgactaatatatttacgtcaattcatctaccccctaaaattattttccataaaccaagtacaaactagcatatgaacctacaagaatgccttgatttctagagctgttgtgcattggttaattcaataaatatatattggtgatccaccctgcagggggctgcatgctgttctacagatacagagttggtaagcatggccttatcccttgggtgctcagaatctattttgcttaccagtcagtaaagagcattgtatgttacaatgagggccatctccatcagctttactaaatgtggattagcctgaaatttaaactgtgtatcaataaggagaactccattttatttaattcattccgcaattccttttataaagcatagtccttatgtaaatatcttcatattcatttctcttataaatgtaaagtttcttaatgtagagcatacctataatttctgcccttgaaattagtatgtaagagtaaatgtttgtgagaagttgcagcattctaataggtttttacactgttaaggtttgtgtgaatttagggttagatcataggtatttctgtctttttctttcatgtacaatcttagaactgggtggattgttagacaatgtgtgctcttgagatagaaaactttgaagtctagaatttagaccttagtccaggtcacactgtggaaggggacaaataggcctaatatctgcttttcaccaaaatagaccaaaagaaaagattttagtctatgcttagagtattcttatgagcattgactttgtgccaatgtatttaaattctcagtttttatatttagaaaaccttaccgaaattcatcaggccacgttcaagaaaggcttaaagagcaaatcttgagtgaaaaatgtaatagccattcctagaagttgttcctttttaaaaatgccattgttaaagctgtcgttataatacatgctctctgtaaaaggtcaattagcagattccccaggatatttaaagttttgtgccaccttctaaatgtcaagttgaagttgggaatcttgtaatatttggaagaattttgccataaaatagtctatatgatgaaaaaacaattccaggtcaaggatgaaagagtggtaggaaatcttgtctttcctccagaagacagaggcagataagggcttagtccagattagcacaaatacagttcccacaccgagccccactccttggaatggaaaggaaattgaacactttttgatacttgacctcctttccctgaacgaaatggtatggaggggcagtatggagtagcagaaggaatagtttttcatgcttttttaataaaagaaaggctttacgcctgcacatacactatggagtatgttttgggagagatttgaaaggataaagggaagaaaataactagtgagacttggtgttggtcctggttatggccagagaaatgaaattaaaagtttggtccatgacttggaacacttgttttcagagcctggaggaaaagaggtgaggacagatatggatgtagaaatctttgtttctgagtttaaatgtgagaaaattcatgcctagtcccttcagttttttgctgagaagatgtaagggagaaaaaataatatctttttttgacctatctcaagagtcataatgggcattactgtaacaaaagagagattaacaagagaaaagcataacaaatgtatttaaccaaagttttatgtgacacagccttcaggcatgaagattgcacccagggaaaactatatatttttatgaacagttgttggaaataagagtggagaacaaaagggtacgatctaatagtaataacctgggaagaactcagtgaggcctgtttgttcagattcttcttggcctctggatatagagaaggaaccctatagactgagggtcttacgacctactttcggaggatgtaggtcagagattttttttttttttttttttttatgaccatgcttcagaggcaaaagtgtggaaaagattagggtgtgagctccaaggtgccatattatggagcagcatgttctgagccccaacaaagacaaggccatcttctaagaaatttgtggaggaataaggattgagatttgaagagaattgtgggtgtttgggaaatctatctattattggggacaggaaaagtttcctggcaacagtgagtatccagccaaggttgaaaactttgaatgtgtatttgtatcaatatgcctggttgtgttatttctctgccagtacagaatagtctagaggttgaaaagtgttcagaaagagccaaacatgaagttctgcagggtggctttaatagagaaacctaaatatgaagacattgaggatctggtgagagtggttagaaggattcacatgaaggttccatagagagggaagcagagccatggagtgagtgagagatcagtggggaatgaatgttgaaggtctctttgaggtagcagagcagttgttcttggagtaaggaagttagggaatttaaaaaaagggcgaaatatctccacaggggatctatataggtgttctagattagggatcagcaaactttaaaagggccagataggaaatattttcagctttgcaggccatatcatttttgttacaacttctcagctctgtccttaaagcatgaaggcagtcataaacaataagtaaagaaatggacatggctgtgtttctgtaaaccttttttacagagtaagtggtacgccagatttttctcaacagttgtagtttgctgatgccaggtcatagatgataataatttccaggatgtggataaatgtaagcagaagtaaagacttagaaatcagggggctaagaaactttaagatgtgtatattgactaaagccatctagatcaggatttttgagaatccgtttgaggctggtgatcatgaattatagaagagctactcatctgctctatagtgtgactccttcagctacatttggctgtgtggctgaagtcacagataaggcaaatgtttgcattcatatagggctaggatttttaccagatgggtataatggaatgatagaggagaagggaaattcaggatattgaaatgatgggaagtggtcagtaagctaaagaaaggagaaaactgataatagcaagtagaggggtcagttaactggtgatcatcaggaggtctaatacccaaatcagcttcacgagggcagtgactgttttattcactcacatgtcccagcacctagcatagtgtgtggcacatagtaggtcacaggaagatcatttaataagcaagcaggaaaagtgggaagttggggtcacgcttggatgagtggtggaggaagttatttgttatggatgacatctcatatgcctgaaatgcacacacaataagttctcagtaattattagcctttatcattatgctttttgaacttttctagggactacatattttcggagaaataaaattgagaataatttctctgcaaatgagtgagttgacctttcccaaatgagtatcatttaaggccattggaacaattagtattgttaaatttaacttcatatgggcagaatacaaaacaaaatactagtagaaattatctcctttccaaattagcctagtctggttctcaaagccagacactcagtgtacttacttctaaagccttcagttgtctagtttagtgtgcttatcaccagtgtggaaaattttatatttacattgctgaatcacctctcagtacatttgaatggcctctcttttgctttttgtctagggctgaagtgtcattcaaaaataggggtgactcaggaagagtttacaggagggagaaggctgaaatgataacaaatctaatttttaaaccatgccagttgtgttagtctgtttttgttgttataaaggaatacctgagactgggcaatttataaagaaaagaggattaattggctcatcgttctccaggctgcacaggaagcatggtgctgacatctgcttctggtgagggcatcaggaagcttatggtagaaggctaagggggaacagccacctcacatagtgaaagtgggagcaagagagagaagagggaggttccaggctctttttaacaaccagatctcatgtgaactgagtgagaattcactcatcaccaaggggatggcactaaaccattcatgagggatctttcccccatgattcaatacctcccaccaggccctacctccaactttggggattacaattcaagatgagatttggaaaggaccaacataaaaaccctatcaccagtgctttcatatttagttacatgaatcaaaaaagtgttttgattttgaacattaagaaatattctttcatatccttttcagacaacttgtatgtcttttggatgtctttttcagatgacctatttctcctttcacaacccatagtatcacgacttgtacacagtaaatatttaataagtctgtgctgactgatctttaatgacaacataagcagttctctgaaatgccctttgctctacctcttggcctggtaaatttattttatgattcggtttcaatgtcacatttaaaacggttcccagctctcatcgttaaaatgaatgggcccctgttccaggtagctcatacccagtttccattacattgtcgttgttcatctgtttctcattcttgccttttatctaccaaggagcagggagatttgggcttattcatctttagtatctctgataccttgcatgtgcttgccatctgtaaagtgctccagaattttctggcaaatgattgtgtgacagggagaaaactcattctataagcatgatgtaggctttagttggcaaaccctgccctctaaaggtttttgcttctttaaattttttctgcagttagaatactgctgtcaaatgagcaatgagtaactgattatgactttgtgatccaattagcagatgtgattaggggatggttagcctttgtttctatacctacttcttttaaattcagaataatccataattgatactcagtatatctttgctgaaagcacagatttcaccaagatgttaacaatggccatatttgagtagtagtatttttatttaactgttttctttagacataatgtttttcgttgtttgaattttctttttcaggatatgtattagaaaaaaaaactattttcattttttaaaatagatggtgtatgaggtagacaattgagagaaatgaatgctttgatgcaacttggaaccagtcagggctggatcacaatgaggcagtctacagtttggtaacaaatctcagtggtttaggaaagcaaaagtttatttgctccagattgatggggactcttctacattcag

SEQ ID NO: 15899 - DNA, 68601 bp, Homo sapiens; identical to SEQ ID NO: 297

SEQ ID NO: 15900 - DNA, 56210 bp, Homo sapiens; identical to SEQ ID NO: 456

SEQ ID NO: 15901 - DNA, 78747 bp, Homo sapiens; identical to SEQ ID NO: 460

SEQ ID NO: 15902 - DNA, 48920 bp, Homo sapiens
gtgagttaatgcacagatactttggtttcgggtgtgaacaaaaactttcttcgaagccgagttgtaaacgcctggcgcacgcctgctcaggagtcaaagacccagcaccgcgttccttatctttgaggtgtgcgggcgccgtcattggaaattatggttaggtgcgcgatagggaacttcagtctctggggtgagcgacgttggcagttccggattcgcttatggtctccagggtcaaaggaaagggcgaaccaacgtttgaaggcagcagcagcttttttccagttgcccaaatggttactcaaaatgcaaggggacaaaggtcgaggctttcccggggaatggttttggtaaaattgctttggggcaaagagcaacatctgggataagttgggaaaactgaagtattggataaattttagtttttttttctggtaataaattttaggaacatagcgggagggccacagccttccaacgcaaatccccaacccatttacaggcggaggctgctgccggcgggtgggcgggggcgatccccacattttgggcagtcagtgcatttggaagttaggggagcttccttcacccttgccctcagtaatctgtttctgcatccttgctgaaatggaagattgcctctctgtgaggtccagatatagagcagagtcactttgtaataatcggaactcagaaacggcctcaattgagcatgggttgcagagatgagcagttttactgagctttgtctacaatcacagcttaagttaattttaaaaaaagattgaatgtgatcaggtacattaggaaaaaaggtttgtcttttttttgtgataaactttaaaaaatcacctacttgaagagtggggaaaacactggatgaggaggtaggagcgccctttctgccgctgttgctgttggtctggtgagcttatctcgctgcagttgggagtgtcggtggttgcaattgtacatgttttatacgccatgtgctggtgtgttcgcacagtggatggctctatgctatgtgctccagggataaaacccatggcaggacagccaggcgatgtgtgtatgtgtttgggatctttctgtaacgccgtgtgctgctgtgttcgcacagtggatggctctatgctaagtgctccagggataaaaccccctggcaggacagccaggcaatgtgtatgtgtgttcagggtgtttctataatgccacatgcaagtgtgttcgcacactgagtggctctatgctgagtgatctcaggataaacccccctggcaagacagccaggcaatacatatgtgtgttgggatctttaatttctacttaatccatggtaaggctggggactgctttataattggtgatggtctggttagagatttcacagttgaaaggacagggcatggacttggatgagagagggcattatctctgtgagtcgcatctgttaggtggcttcttccactccactcagcagcgctgcctaatgcttacttcccaagtgaaccagaggacccacatggagggcagacagctgatttttggagacatttaaagatgaagaataaaacgagcctcaacaagtgctcaagcgaggtttgcatgagtgagtatgatccatggacatcaaagaagacagacataaaaatctgtaatttaatgctctgacggatactttggaagcattctggagttgcagggttactagcatcccggggttacaataaggtgattttatgaagatcagtggctactaaaatgcagtgtggaatgatggagggtcaggggctggctcggtctccagctggctgtgtggcttgggtgagttactcgccttctctgggcttgtatttttcctctgtaaaattagccattggattcagcccgttacaatgctccaaatgccatcagggtcaccacctggttactgtttggtgtgcccagaacaatgattaaaaagtctttaagaaagtagaatgatattaggaatgtaccccgtaaagccccaaaaaagtttttgaaatatattggagagattcttttttgttttgttttgttttgttttctttgagacggagtctctctctgtcgcccaggctggtgtgcagtggcgtgatctcggcttactgcaagctccgcctcccaggttcctgccattctcctgcctcagcctcccgaatagctgggactacaggcgactgccaccatgcccggctaattttttgtatttttagtagaggcggggtttcactgtgttagccaggatggtctcgatctcctgacctcgtgatccgcccgccttggcttcccaaagtgctgggattacaggtgtgagccaccgcgcccagcctctttttaaattccaaatagttttgtgcttcttttggtttgtttttcatgtttggtttcttaagaggaaaacccccatctattcataaagttcaactatccaaaacaagtcagcaactctctgaattctgcatagctaatattttgctgtctttggttcaactaatttttttctttcaaattctgtctgatgaaaggaactgtagttccatcttcagctaacattatgtatccagtgtatttttataaacttgaagcctaagatacaaatcatgcaaaggggtgaattgggagagtttacaaagtgggcgggatgaccagactccagaatgcctccatatagctataatacttcatccttgcaccatggtgggaggggtatcattgtcctggcttcatagaagagagacctgaggaccttccagggtcccacgccatttatgtagccaaactggattcaaatccgggggccttgattgtaagtcagtccactttcctccataaagtgctcaaaatccttcaagcaagtccatgaaacatagtactcagatctctcacactttataacctgcagaaacctcgttgaaactttgtatttattttcttactatcatggtcctccaatgggctactttgtttcattttacggtgtcaggatccacagtcagccagactggcagatggggaggctgtgctttcatttggtgggaatggttctctagcctcctgatgtgaaagttgcaaaatggtcatttaaatctcatacaccaccttcgcatcttacaacttgagatagttctaagacactaagtcagaaatcaatgccaagggcacatccctttatggccagctcctaatttgtgtctcctgctcaaggcaaggcagtggatttatcacccacattgaacttcctcagtggagacttttctaatgtccgaatctcggccttatcttgttgtcagatattgggcagaataaaatacaatgtaacgcagagaagcgagtctgaccccctgtcccaaatatttcaattcactgcccagggagtgtcttcaagattgatgctaggatttttcaatgcttgctaatatggtatggatgaaaaaaaaagagcttttccctaggctatcactcagagcagggcttcagaacacctttaaaaatagactgaatcacatttgtttttcctttccagatcattttgacttggaatcactttttcccttccagattacctggctgaatctataaaaactgaatccattgtttgtttttattagaagagtgtgtctttcccatactttctgaaacatcaacaattcaacaaaaattttatgttggcccttgtccctcagagtaactagtcctttctgttgatgacaaaagtgttttaatagtgtaataggtttttgttttgttttgttttttgacaaagtctcgctatgtcacccaggctggagagcagtggtgcaatctcagctcactgcaaccttgccccccgggttcaagcaattctcctccctcagcctcctgagtagctgggattacaggcacccgccaccgcgcctggctaatttttgtatttttagtagagacagggtttcagcatattggccaggctgacctcaggcgatctgcttgcctaggcctccgaaagtgctgggattacaggcatgagccactgcacccagcctaatagtttatttttaatggagtgaaagcaggactctaatgagtgaacagccaccccactaggtgtctgattcttggtctaggcagcagaatggccaaacagattcatgcagcaatgctttctggacctcagaacaaggaaaatatttacaataaggaccttcattatgagaatgtgcaagagtatctcctgctcctctctggcagctgatattttggattatcaacatcagttcagctgaagtttatttagcatttattttattctaggcactgggctaggctggggatacaaagatacacgagtctttctcaaaacagcgtgaagcttggcagggaaaattgcagcgataatgtgatgacagtggctgtgggtgtgataaagggtaccaccctctgatgggacagaggagtgaaccagggcagaaagtacattgaccttaacctcaacctctgagtacaaggaggagtccaagaggaaaatatgagggaaaagatgttctattctcacaccctctcatcttcattattttctctgcacccatttattttgtgccctcaggagcagtggttggtgtgcattctcgggtcgcacacacagggtttggaatcaaaagacgagggttggagttcaggaattttcctttttcacaaacatctagggcccttttcagatggtccatggaccacacagagagacaagctgggtgtttcttaatgaggagcatgatgagaatataatgactgggagagaattgccagttccaccaagcacaccctggagactctcagaggggaacattatccctttatcctcagacaggtatcccaaatcttatcagatgaaatgctgctgtttattttcagagagctttgagctctccagggatgggcaactgataataaaatcctggaattaactggggagcgggggaagcccacagctgaaccacactttctgggagtcttggtaaaccttagaaaggagctttgggcaaaggtaggggactccaacagatgttgcagagacatctgtacttttggacccacgggttatttttggcattgacatcttagtagagtggaaagaatacacatgtcctttggtgtcagataaatcttgtcctaaatcccagctcctctattaacttgaagggcaagtcaactgagcatctgcctgagcctcagtttcctcagcactagaatgggtacaagaatgcctgccttagcaattggcttgacatatgcttgcaaagtgcctggtcataggtggtgctcagaacagttggttcctgtgaacacataaagacccttaagccaggtgggagtcaggagggagggaaggaacaggctatgggccagatttgaccctggagctgtaagtttgctgatccctggtctagcataataaatcactgataaatttgccttaaatataaagagtcaaagccttggccagttgtggtggttcatgcctgtaatcccaggagtctgaggccagcctaggcagcattttgagactccaactatacaaaaatattttaaaatttttaaaaaattggccgagtgtggtgatgcatgcctgtagtcctatctactcagaaggttgaacccaggaggtcgaactgtgctgctgtattccagcctgggtgacagaggaagaccctgtctctaaaaaataaaataaaatatctcggacactaatttgctctaaaggctgagaataccgatactttcccactggaccccacaggtaggtcatatttcccagcttcccttgaagctagagaggccacgtgtctgagtcctggtcagtgatgttggggaagtgaatgtggaactgctaagcctggagccggagcaaccttcctcctgcagtccccggaggatggtggaactcttacacggaaggatatgcgttcctggaggcatgcgaggcaggcaggagccccacagctcccctccacaccaattcatctgcacaggaatatgggattgcgaataagaaataagctttattgtgttacacaactgaggcttgggagactgcttgttgcagctcttcctgttaggctgctctgactcatacagcatcttagtgtgcttcctggcagggcacaggtcacgaggctgtgggcacctgacaaaatggtatggaggctggtgcctctaagagcatcctcccctaggtctggtacacaaggtctctgtgcctccaccccatgtctccgcctatagaggcttttccctctcttagcccccggggctcccactctccaggcagtcaccctgggacatgtgccacagctgtcctccccttgggctcttgtgtgcgctgtttcctttcctttcctcaaaatacctgtctttcctcggccgggcacggtggctcacacctgtaatcccagcactttgggaggccaaggtgggcagatcacgaggtcaggagatcgagaccatcctggctaacacggtgaaaccccgtctctactaaaaaaaaaaaaaatacaaaaacgattagccaggcatggtggcggctgcctgtagtcccagctaccggggaggttgaggcaggagaatggcgtgaacccgggaggcggagcttgcagtaagctgagatcgcaccactgcactccagcctgggcgacagttagagactctgtctcaaaacaacaacaacaacaacaacaacaaaaaacttgtcttttctcatgaggctgttccgttttgtacctttacacacaccaattccagacacaccttccccactgctgcctctacccagggctgggcttggcttcctttatctgtctagctgccttccctctactcatcttgtgctcactgcctcatcagactctgaggtgctggagggccggcgctctgccctcctagcctaacgcagtgtttggcaaatatttgtgattaaattaatgaatgaaagagaaagggattccttggcacgtgtaatgctttttatgaccatggctaggccaaccctggaattggctttcagagattaacccaggccctctaccgatggtgttgcttcctgttgactcctaacgccgattccttgcctcatcctccgccttcatcatcttctgccttgcatccatgaggtgtgatcagtcacagggtgaacaatcatcggcggccatggccgcccgcagacctctggagcaggaggaaaacaggcctccactttacttgactcctatctgctcatggggtctgtgtccgcagaatcctaatgtagggggtgtgacctggaacatgaaagggacaggaaggaatagaactgctggctctttggggccataattttaatgtgctgacgtccattgtgcagaagagacttttcccagctgtcctggcaccacacagtagtctgtgtcatcaatcgagcctgctccagggcagctgggcacaggtgcaaggcccggtgcagggaggagcactgaagggcctgggctgagcagctcccagggtgcagcgctgtccccttcatggctatggagtggggagcaaacaccacctaccttccaaaacaaactaaaacctttccaacattctgcctcggttttttccccaccccctcttaaatcataaccaagaaaggacatgtatttatattctgtgaggaaaaagcaaagttttaatggtctttggtgtggctttttaaaatgataaatgactgttgagcttgtcaaatcatggctaatactgttttatctgggtgagatcagtaacagctttttaagggttaccatgctgttatttctcttcgtgttggtaataaagcaaaataactctgtggctggtacttgtgtgataatagagaaaattagtgaggggtgaagtttaggggcttagaagaaggtgaataaataaatgtaatttaaacaattctggggcaggcatccatcccaccttccttaacatctgctctagattctagtgccctgtagagtccaaggaggggagctgtccttgactgtgagcatagtggaaaccactggatggaggaagggtaggcacaagcctggacctgagaaacaaaggcacctattctgctttcaaattcagtcctgggagagcaggtgacctctgtcataggactgctatagggcaccagcagtggagataaccaagtgataagcaagtctttggctttccattaacagagaccactggtcccaacatggaaaagcgtcccagaagcctttcccagttgctgcgtccacctagcatacacacaggatggctctgatttcatgacacttctgccaacgggaagctttgggcaatcgacagcacaaaatgaaagacaacatgtgtgcttccaggctagtggggagggacgccgtaagctgatgcttctgagacagaaaccgaagggacaaggtgccaggagctcctatactaaaaactgtttgtagcacatttatggggattaagtggttgtggtgaaaacagcctgcacgtttaatattgatgacgttttaaaaagcaatgcactgcaaatatctgttgagaaatgaatgccctttaattgttcacaaatgagtatcttaaagaaaatacccatagagaagtcacctggatagttaaaaacattaactacccagggtagaggagaaaattagattgaaactaattcagattaatttggcatcaactttaaagaaatcaaataaataaatgtccaagttattagagtgtaagaaagtgttccaggaaccttttccacagaggttcttgatcttcctgtgtggcagttagtgggaaattatgtgacaaatttatcacatctcttgtcagctcctagcatccttgtaagattgctacaattccctatccagtctgtatctaatagagcatacataatgatttttattttaattccaaccaagttgaatacattataaaaccaaataaaattgtctatttatcaactccagagatcattagataataacaatttattgttgcagagttttgtgaaaaaattatcaaattttagatccaaactggtttagtgtagtgtattgctaaggcaaataggtggctaagaacgtagacttcctagttttgtggatgcaagcaaatggctgaatttgagggtttttgagctctggactagcccagtcctgagatttcctggttttagtggggagacttaggtaaataaggcattcaaagtgcttgtcctgttgtctgagatatgtaagtagctggtgatgatcatagatgctgacaacagatactgagaaagttgactcagagaggcagcttgggcctggaaattcaggcaaatggcaagcccctagggctgagggaagcgtgctttaggcagggcaccaagattccaatactaaggacgtggccagggtccactctctggagctggtataaactggagcttagtaatgaaaactagggaaaggcccagggtagaggtcggagctaccagatttggcaagatttctcaagcccccgtggattcagttgtgatatagagtgaacaatccccccatccgggtggctctggggacaaatgagaaacatgcaggaaccgctgagcatgtggaaggtcctgggcacatgccagttccctccttcttgctctttgtcactaactgtggtgcccaagtcctccccttgcctggtctagtctggggttgctggatgtggactcactcagaaccccacacttctttccaattgcagtctgagcagagggacgctgggacagagccctggactttcctaaaaccgggaaatcccaggacaggactagaccagagctcagtgagggctgaagactcagctgtggggctgcagggcttgaactccatcgcatgttttctcatgagcctggaaatccttcaataaatatgaacaacaaaagtgccccaaaggtgctgtgttagaaaggcacccatctggctcatgcctgtattctagttgagtcaataaggcaaatttaccttatgttgtttgtgggcagttgcaatggtcctataggcaatgaaaacatcagatcacagtttgcttgtgttgctgtgagaatctgacctcaaagaaaatactcccccaacccaaatccaaatctatgaaatgaagacacagcagttgtggtggggcactaattatgaatgttgagcttcaggttagggttgaagtaaatttgggctaaagtgctttatatattgagcattccaattctcataacattgaatagacactaaaacttaatttacgaaagtagtttaatagccaatggggacaaaaatttattcttacagttatcaatactcacttcctgcttagaaacttgttttcttccttaattaccagaaaacagagtacatttaataatcaatcatactaaatttaaaattagggaaagagagcttatggtgttcagcaaaaagggaaatatcaaaaaagacatcttagcatctggattttttggccaaaaggagagcctgcagtttaattaatggtctacatcaaacaggatattttatgaagcaatagaaagctgtaattaaatctagccttctggatttgatacatcacaaaaccaggagataaaaacaacagaaaattggtgatagggttgaaactcaaccttgttcaagaagcattcacaatggaagctgttgacctatattctatatactttacatttcaacagatagtctatgtttgaacagtgatttttttatatgtgaagattttctgtaaagaactgtattaacatttgtaaacagagtccaagaaaaattaattatgactccttttttggatttcacattggtacagcatgacctttaactcattatcttattacaactattagaagaatagtaaaaacatatttcatatacttttcaaatatttataatcatagtattctttttataatagttttcaattcttatttgatagcatgctatacaattatttttccttactaaactttcatagacatttcacttaaatgatttttctttttttaaaccatataacctgtcaaagtataaaagacacatacaagcggccgggcacagtggctcatgcctgtaatcacagcacttcgggaggccaaggtgggtggatcacctgaggtcaggagttcgagaccagcctggataacatggtgaaaccccgtctctactaaatatacaaaaattagccagccgtgatggcaggctcctgtaatcccagctacctgggaggctgaggcaggaaaatcacttgaacccaggaggtggaggttgcagtgagccaaaatcacgccattgcacttcagcctgggcaacaagagcaagactctgtcttaaaaaaaggatatatacaaggtacaaattatttgaattagtctatattgatctcccttttcattctctcagtttctctttattaaacctctttctcttaagaacataaacaaacaacaactactagaaaagctttaaagtccagcattagtcaaattgaagtactgtcctgacccggaaagcattatccaagaaagtgcatttcaaggccacctttcctaaaccagtctcaggaaggtccacgctctatttccctttgcaaaagcatttaagttaatgctgatatatgatttgtatttattaactcccccccgccccaaccaatgtagtcttttttaccttaacctattattgacttggtgacaagatatagagtgatcatggagctgggatccatgttcctatgtgtcatcagttagaagaatgaagaggccaagggagtcattctaatatttatatggaagaataaaggcccagaagcaggtaaatcattctaaaagaaggggtagggagtaagaggagggcttcctctaccagaaattaaagtgaaattccaagccaaagtaatcagaacagcatggtattggaacaagaacagacaagtggaccagtgaaaagatcagagcacttggagactgactccacccaggggaacatcatatacaataaggatggcctcataactccatggggagaggatggattgttggctaactgatgttgagaaaagtaatgactcatcagatatggagaatgatcaatctgcctatcaccatgtacaaaggtggactcagggtgaattgaagacttaaatgtcaaagtaaaaggtaatattaacaaaggaacatacagagaaacatgacaaggtcagggaaagactttttaaagaaaagtataagccaaaaatggattatctagattatatcagatttctgcctcatgacagataccatcagcagagttaattaagtgatgacaatgatactgagtagagccatgctactctaatcaagggtcgttatgggagttatacaatgcatattgtacaatgcatattgaagccaaaggcttcaataatgttcactgtgtgctcaacactgttgtagacacttgacatgtgttcaactcacttaatccctacccacttcatgaggcatgtgccatttttgtagattttttttagaggaggaaaggaaggtacagagagattagataatttgtccagaatctggagctgcaggataggagacttggaaaagaaattgcaatgtctgaaccaacaagtaattaactgacatctctagaacaggaaaagaagttctgtaaatcaacaagtaaaagatagcaagtcttgcagaggaatcagcaaaggatacagatagttttcatgagaagaaacttctccaaaaggcgactaagcacatgaagaaatgtgtgtgtctggggagctttccccttctaatactaggtcagtttctgtgtggtaacttgagaatacaatgaaacatcgtttaaagtaacctgtggcatgttactggtaccttgcaggctaaatacatcctaagtgtgctaatactgcagataccttgatccccttaggacagttgacccaagccttcccaggagctgtttacctgggggtgtcacctggctgcaaaacagggatgaacaatgcacagatttcaggggtcacccagggatgctgcgacctcagaacacgtcacatggaagatgcctctcagtttccatctgaaaagcctggtattaatccaataattcaatcaccaaatttagtagttgcattccccagattttcttttgggcaatccacagtttgtagaatgcttttctgtgttcccaggttcagaatttcagggattgcttctgtcttcaaggagcacttcagcttcctggttaggaagagaaggtagcagacgtgtagaaaaccctctgcgagactctgctctggcagttttatgggtaggcgcaggcctgcctgaaaccaaacgctttcctttttccttcaccctttcccgttgttgtctttttggttcctttggtatggtagtgtctccatgtgagtttccagggaagcagaggctgaagcgagggcgtgggagctgtttcatgcattagactctctggggagcagccacagggaggggactgagggacaccgcgggatgtccagagaggccggtccccagcgggtgggggcgggccagacggtgcggagggggagaggaggaagactgtgtccagggcatgagccttctggcattgtgggttcccccacgctccagcgccggaggggacccaggcggcaccagcgcgttaggctgcccccgggagcagtgctgcaggagccccgagctcgaggtggtgccggcagccgcgcgctcagagctccaacagggctgggccgcggccaaggagccaggagggtgcacgagaacgtcccatccagggacccacggatacttcgttcctgccagggtctcctttgggccgacagagttgtctctaattgagtgcaggcagccccggagcccgccgagagctgaggctgggctgggctcccggggactcgggcagctatttcaggcagacgcggggcatcgcgccccaatgcgcacagtgttgccgaggggcagaaagagagggtctcagcctaagccaggtggaaggtccgagaagaggctggaagggggcgatggtccagcaggagctgggatgaacaagggctggaagagcaggtgggagttccaggtgagggaagtgacctggaagcggagcagaggtcgcagctggcccctgctgggcctagtctcgcttctgtcgtgaccccttgtctaggaagatcccatcgcgaaggcctcatgagtcccacgtgaccggcacgcctgtgaggcaggaagctcagagtccaggccccgtgcccctctttgggggctagagcttctcccaggtgcaggcagcctgttcacaagagcggggccctcctgggtgaggcctcaggctccggttgtcacccctggcaggcgtgtgcccagcttagatccacctgcagctggctctgaacgctggatggggctgggttggggttttcctgtggcctggggtgagtcccagcaagccaccaccatccttgcccactccccacaggacagagcatagaccctgttcctaatcctcccaggccacactccgcagaatgctgcttctctgtttccaagcgcctgcatgtcttgcatcccctgccaccatcttttgtccgcctgaaggggcagccccataaaccttacttagacatgtccctgcccccagcacaggggctgccttcaagaccgcctttgtctgtggggtttttccttgatgactgttcagcatgccggccccactttcttctgcttgcatctggggttctcccaggctgaccagctgtccccacttgctgggagtgaaggggtttcctgggatacgaactttcagtattaaaaccaggagagtcccagacaaactgggacaattggtcaccctaactgacccacaagtagaaaaatgattcataaaatgtataataatgaaaagctgtgaattatttgcatgtataatagagggagaacatggttaaataaatgtggtgtagccatttgaaatagctactacagggatgaggaaacaatacctataaaataacacagaaatgttgatgacatattaaggaagaagaagtctgggttatacatttgtgcaaactgtatgatttcaaccatatttgtacactccatgtggtagatgggttgttggaaggtaaagactggctgcataggggccctaaaggtgagagcttttcaatactgctgcttacgctttcttcttaactaattcagatattattttgccaaatgcagagccaggaggtgtgaagcagccttcatggtggcaccacatgtgacacagatgagtagatgggtgcagcgttgacaataactgcagtcatattgttcatcttgatgggatttctgagtaacaagtcaaagatgcagaaattaaagtatacaaattggattgggttttcagtaaaggaaaaggcaccaaatcgtttctcagtaaggcacagtaaagggaggctatcaaaacctattgttagtaaaagtacctattgatgatctcttaagcaaaattgttacctagttgtccacgtgaaggaaaggactctctgaaaagagggggctgtttagagaagaatcaagcctctggcaccagaggggactccccagttaggaaactgttgtaacaaaaggactccatcgctcagagcaggatcagatgataaatcaggctgaaatggtataagaaacctacaattaccttcctccatatgaataattgaaaaggcaatggcttcatttaggttgtaatctgacttacagcttttaatagctatgctctgttaaagtgtacacattatcttttaccttattgagtttatattgctttatatcaatataatgatttttttactatgtaaaaaaatacacttacatagtaagtatatttacatagtaaaatcaataattttttttactgtgtagcaaaatacacttacttgattcatgaaccattaagtttttaaaatctgtgtgagataatgtattctctgggtttattttgactactgaaaatttctagtcacaagacattatagctagatacattccaggtgtttttaaatgttaaactgtcttcagcatcagaaatggcctcatgaggtaagtcattattttcccctattttcaaggatggaattgaggctgggagcagttttgtgactcacccaagttaagatgtcatgaaaaattgtttccttgcaaggtctgccacaccctaaaccaatgtcctgtcccaatccacctgacttgagggctgttagattttagatgtcagaatcacatggagggcttgtggaaccagactgctgggcctcactggagtttctgatccaatgggtctggggtagggcctgaaaatttgcatttctaacacttgcagttcccagatgttgccgttgtcacaggtcttgggaccacactttgaggatcactggtctagaaggaggcttgtattagctagtgatttttttcattgtgatgatgatggctaaccttacacttgaacaaaaaatgtggctttctttaaagaaaatcatcagaagttcagttctttaaaattcagctactactcactgacatggtgtattaccctgttctcatgctgctaataaagacatacctgagactgggtaatttataaaggaaagaggtttaattgactcacagtacagaatgtttggggaggcctcaggaagcttacgatcacggtggaaggggaggtaaacacttccttcttcacatggaggcagcaaggagaagtgctgaacaaaagggggaaaagtctcttagacaaccacgagattccatgagagctccctcactatcatgagaacagcagcatggggtaaccacccctgtgacacaattacctcccaccaggttcccccatgacacatggggattatgagaactacaattcaagataggatttgggtgggaacacagccaaaccatatcattccactcctgtcccctcccaaatctcatgtcctcccatctcaaaacacaatcatgccttcccaacagtcccccaaattcttaacttattccagcattaactaaaaagtccaagtccaaagtctcatctcagacaaggcaagtcccttcaacctatgggcctgtaaaaccaaaagtaatttagttacttcctagatacaatggggatacaggcattgggtaaatacagccattccaaatgggaaaaattggccaaaataaaggtgctacaagccacatccaggttacactgatgcaagagatgggctcccacagccttggacggctctgcccttgtggctgtgcaggatacagccccgtcccagctgccttcatggctggcattgagtgtgtggcttttctaggcacacggtgcaagctgtcagtgaatctaccattctgggttctggaggacagtggccctcttatcacagctccaccaggaagtaccctagtagggactctgtctgagggctctgaccccacatttcccttccacactgccctagcagaggttcttcatgagggctgtgccccacaatacacatctgcctggacatccatgtgtttccatacatcctttgaaatctagatggaggttctcgaacctcaattcttgtcctctgccaacccccgggaccaacaccacatgaaagctgccaatgcttagggctgagacctcctcagcctggattccattgtccactatcagcattttggtcaaagtaattcaacaagtctctaggaacttccaaactttcccacatcttcctgtcttttgagccctccaagtctctaggaagttccaaacttttccacattttcctgtcttcttctgagccctccaagctgtttcaatctctgcttgttacctagttccaaagttgcttccacatttttgggtatccttgtagcagcaccccattctctggagtaccaatttactatattagtccattcttatgctgctaataaagatataaccaatactgggtaatatataaaggaaacaggtttaattgactcatggttctgcagggctagggaggcctcaggaaacttacaatcatggtagaaggggaagtaaacatgtccttcatcacatggtggcagcaagaagtgctgagcagaagggggaaaagctccttagaaaaccatcagatctcgtgataactcattcactattatgagaagagcagcatggaggtaactgcccccatgattcaattaccttccgccaagttcatggggattatgggaactagaattcaagatgagatttgggtggacacagcaaaaccatatcacgtggtttcttttactgaagcattttcccctccactgcaacttgcatacctgtattgcaactttcaagtgctataaaaatagcacatacccccatcaggcattgatagcacctccatgtgcagattttgaaggtaactgaaacttcctctgccctgacaggccatgctgctgctcagtgtcttccgctgctgtctccaagtggtgttcttgtcatcctggaagccctgccttgggccatgcctgaaatgcactaatatgctcatttgtgaggtagtacagagtggtcagggcatccaggcacatcatggatgatggggcactgttacgggtgctgggacactgccatgaacaagaggcccaggtccctcccctgtacctctgtagtcggtgccagcctcatgccattcagctaccttcacccataatgtccctgcaccctctctgttgagtctacctcctcttcctcctccatccagcctaggtctctggcccagttcttcagcccatatcttccagtggccccactgcccttcccactggcctgcctgggctgagagcactgctggagacaccactcccagtacatgctgctctgtcctctctagttcccggtgtcctgatattgcctgatagtcatgttgagtgtcctgacgtccactctggctctccagactctgttctctgccaacttccaacctgcccctccccactcataccctctccccctactcttagcaaaccactcactctccacttccctgagaaaatagaaaacttggaataatacgcttcttcgatgtcctgcaccaggacaatcaacttctctatctctgctcccatagcttccttctaaccccacagcagaagagttataatactgccccctgttgaaagcttattttccacctgtgctctggtccccacccctcctggcttctcaggtgatttccacctgcctaccacacccttgatgcctgtcttcagtctctccttcactggtgttctttgcttgtccacccttaaacctgcttaagttcacctgtccacgcttaaacctgcttaagttcacctgctatttaaagcagtgtcccttatccctgtgttcctctgcagctgagcacctgtaattccctgtcataggcacattcatcatctctacattctcaccttccactcactcctcaacctagtgtggtctccatcatccccgccacaccacagaatctgtgcttcccagggtctctgatgaccttgaggttgctgttcactcacctcctcacccctggtcttatgtatcacaccaaagtgtcagctgtgcaaaagccaggaataggattcctactctgtagggacccctgtggctggcgcaggtagctgccatagtcaccggttcatatttcaccgttctgctcatttcgtgctccctggtacatctcttatttcactgcttgcatattctgtccaagctctgataaagccaaacacatttaacagatggacacaactggccatgcttcaggcttctgattcacccatacttccaggagccatgaatctgaaatctggagctggtctgtagaaagcattctatttagtgaaatgttgaaggaattttaggtcaactatcatgtatttcattgtctccaatgccataatttccaagtgcctacttgaacagtagatactttcaggggattttcatatcaatgattgcattttgccattgttctttattttttcagtaatgctccatctgtaaacaacccaaatttcaaagcctgacatagtgtattgacaaattattcctggatgcctgtttttatcaggccaaaatccatagttattctaaaatggatatcatacaaataatgctgctgtagcatgctaacattttccagactattatgaaaatgtttagctcatttacaagtcatgggaaacaatatcggaatttgctactgtgtagaaccattactatagcacttccagtgatgcctgcttgtgatctttattgcccactttatagttctgtattttcatctccattttttaatccttaaatatacaaagtaaaatgtaaatatcttttttgtgggtcttttagaattattttttagcattagcacttgtaaatttactggaagtttcaacaatttgtatttcatgttagataaaagtaaggaagctttcaaagaaaagtctaacaaatataacacatgtacccacctccccaaatgaaaaaatgttagcattttgttgtattttatttagatttttttgcagagaaataagccattatacatcaagttgaaattctacttactattgttgtgcgacaaattatctcaaaacgtagtgatttaaaacaaccatttttttttactcacagattatgagagtcatgaatgccgaacaggcacaagaaggagtgtttctttctgctccacaaagtgcagcttcagataggaaggcttagaggttgggatgacccaatggccagggcaggagccgtcagggtgtcttaatttactgatttggcagagagtagtgctgtcagttgggccctcagttagctgcaacaactgcacatgatacctctgtgtagcttgggcttcctcctagcatggtggctgcagacgtcttacaaagtggttcagagccccacaggtgtgttctataatagctcacaaggcagaagctgcattgcctttcaggacctagcctcagaagtcacactgcctcatttctgctgtattctgtcagttccaggagagtcacaagcccttcctggattcaagggaaagggaattagatgccatttcctgatgaaggtggggcaaagttttgaaagagcatgtgtgggggactcatgccatctttggatagtcccagtctccctcctcaaggacatcaactcttgtagtttgtctccagtccaaacatgtgtgggcactttccctgcatatgtgggtatccacgtgaatgtctcttcattgcttctccatctttctaaaaagtaatcacagagagtcatgaaatccagtgttagaaccaggcattgttaatgctcttatgttattattattcaagctgggctaggggaatgtggcattaataaaacaatatgtacattggatttagttatactatactctctattctaatactttgtaatcattagtaataaatagtagcatattacttcatgtaggattttgcaaagcttaaactattttcacatttgttccttcagtccaggcttcctaaaaataaaatataataagagtcttgagacttaagttcatattttgcatgaatcagataaaataatagatagtaaaatgctttgtaaactgtgcagagctattaagttgccccttatcattaagtttttaagtctgattttctgatattgtaatcctgtcctaggcttcctctcatttctttgctgtaatctttgcttctacctcatttcttgtgtccaaatacaatcagttattcaaggcctggctcaaatgctgcctagaagcctttcctgacacagacctcccagcttacctcctctccctcctctgtgcttttatcgcattctgtgtttctctggtagattatcttttgtattctatttcacgtatcacatcactggggctcacctggaagcttctagcaaaccaaaccccagtctctgtagcccttagtgcacaacaacatgcctcccacccaggagcaggctgtgaaagtctttttattttttaattattatactttaagttctgggatatgtgtgcagaacatgcaggtctgttacataggtatacatgtgccatggtggtttgctgcacccatcaacctgtcacttacattaggtatttctcctaatgctatccctcccctagtaccctaccccctgacaggccctggtgtgtgatgttcccctccctatgtccatgtgttctcattgttcagctcccacttatgagtgagaacatgaggtgtttggttttctgttcccatgttagtttgctgagaatgatggcttccagcttcatccatgtccctgcaaaggacatgaactcatccttttttatggctgcatagtattccatggtgtatatgtgccacattttctttatccagtctatcattgatggacatttgggttggttcccaagtctttgccattgtgaatagtgccacaataaacatacatgtgcagcgtgtttctagtagagtgatttataatcctttgggtatgtacccagtagtgagattgctgggtcaagtggtatttctggttttagatccttgaggaatggctacactgtcttccacaatggtggaagacaatcccaccaacagtgtaaatgcgttcctatttctccacatcctctccagcatctgttgtttcctgcctttttaatgattgccattctaactggcttgatatggtatctcattgtggttttgatttgcatttctctaatgaccagtgatgacaagcttttttttcatgtgtttgttggccggataaatgtcttcttttgagaagtgtctgttcatatcctttgcccactttttgatggggttgtgtttttcttgtaaatttgtttaagtttgtttacaagtgggatgacagtgtaaagtctcccactattattgtgtgggagtctgaatctctttgtaggtctcgaagaacttgctttatgaatctgggtactcttgtattgtgtacatatatatttaggatagttagctctttttgttgcattgatcttttactattatgtaatgcccttctttgtcttttttgatctttgttggtttaaagtctgttatatgaaactctgggatgaaaattattgtcattcagaatgtcgaatactggcccccactctcttctggattgtagggtttctacagagagatccactgttggtctgatggacttccctttgtgggtaacctgacctttctctctggctgccctttacattttttccttcatttcaaccttggtgaatctgacgattatgtatcttggggttgctcttctcaaggagtttctttgtggtgttctgaatttcctgaatttgaatgttggcctgttgtcctgggttggggaagttctcctggataatatcctgaagagtgttttccaacttggatccattctacccatcactttcaggtacaccaatcaaacgtaggtttggccttttcatatagtctcatatttcttggaggctttgtttgttccttttcatgcttttttttgctgatcttgtcttcatgatttatttcattaagttgatattcaatctctgatatcttttcttctggttgattgattcggctattgatacttgtgtatgcttcacaaagttctcatgctgtgttttttagctccatcaggtcatttatgttcttctctaaactggttattctagttagcaattcatataaccttttttcaaggttcttagcttccttgcattgggttagaacatgctcctttagctcagaggagtttgttattactcaccttctgaagcctacttctgtcaattcatcaaagtaattctaattctccatctagttttgttcccttgctggcaaggacttgtgatcccttggcgagaagcagtgtcctggcttttggaatttttagcatttttgccctggtttttcctcatcttcgtggatttatctacctttgatctttgatactggtgaccttcagatggcgtttctgtgtagatgtcctttttgttgatgttgatgctattcctttatgtttgttagttttccttctaacagtcaggcccctctgctgcaagtctgctggagtttgttggaggtccactttagaccttgtttgcctgggtatcaccagtggaggctgcagaacagcaaagatttctacctgtttcttcctctggaagctttgtctcagaggggcactcaccagatgtgagccagagctcttttgtatgaggtgtttgtcaacccttgctgggaggtgtctcccagtcaggaggcatggtggttagggaatcacttgaggaggcagtctgtcccttagcagaacttgagtgctgtgctgggagatctgctgctatgttcagagctggcaggcaggaacgtttaagtctactgaagctgtgcccacagctgccccttcctccaggtgctctgtcccagggagatgggagttttatctataagcccctgactggggcttctgcctttctttcagagaggccctgcccagagaggaggaatctagagaggcagtctggctacagtggctttaccaagctttggtgagctctgtccagttcaaacttcccagaggctttgtttacacggtgagggggaaaaccacctactcaagcctcagtaatgatggacacccctcccccaccaagctcgagtgtcccaggtcgatttcagactgctgtgccggcagcaagattttcaagccagtggatcttagcttgctgggctccataggggtgggattcactgagttaaaccacttggctccctggcttcagccccctttccaggggagagaacagttctgttttgctggaatttgaagcaccactggggtatgaaaaaaactcctgcagctagctcagtgtctgcccaaatggctgcccagttttgtgcttgaaacccagggtcctggtggtataggcacccgagggaatctcctgatctgcacgttgtgaagaccatgggaaaagtgtagtatctgggccagaatgcatggttcctcacaggatggtttctcaaggcttctcttggctaggggagggagttcctcaaccccttgcacttcctgggtgaggcaatgtcccaccctgcttcagctcaccctctgtgggctgcacccactgtctaactagtcccagtgagatgagctggtgcctcagttggaaatgcagaaatcacccaccttctgcatccacctcgccgggagctgcagaccagagctgttcctattcagccatcttgccacctgtgaaagtcttttgaatggatgaatgaataaatgaatgaatgaactgttttttcactggcttcatatgctcatgcctcactaaggttgtagaaaatacaggatcttgaatactttaaagtggcaatgtcttgtgagacagacatcatccctgctgtcccaaaattacccagcgtgtgtggagaggcccctggctttggagatggggggcatttcccttgactcccacctcctcagcaccacagggctcatctctggggacctggctttccagttagagcagacctggatcaagaagggccacaggaaagagaaaagaaagacttggcagtgggagggcagggcgttcaggcctctccagggaagggtgccaacctctggacttagcatgatgtttttaaaagaaatgaatgtgtgtcttgtctctaccttcaacttgtaaggcaagtgcagtgccagaggctggggtatctctgctgcccaggtgcactccacagagacagagcaagagcacgtgcagactgtgctgtccaactcgcatagaaggctgacaaccacttccgtcctaatggggaaagtgaagttggcaaggcagaaatgaccacatgctcacccaaaaccttggtagcagcatgtctttccagaaattttgcaagccagatctggaaatttgatggctttgctcctctttttcctgaaagaaatggaaggaatcaggctcatgaaaagccagatttcacctccatgcacacaaccaggacccttgccttcctgaaatgccccacaggctttcacagaatagatgcagtcttagcagtgggcagcttgcttgttgtctggcctaagtctgagccaagataaagacatataaactgccaaggagacactctattccagaaccttctcttctttgcaaagcaaacataattttaagatcaagatgcataactcttgtaatcaaaagcttacacatttcctagcccccccaccaccctccacccccaagcaatgggttctaagcaatataaactgccaaagtggtgtgtagagggaaataaaaaccagactggtaagataccaacttttttataccagtttcagaaagtgcttatgcagagcaagtgtgggacaatattcaattggcaaaaatatgatgaaagtagctcacttaagaaaggaataaagtcttgtttattgaaagaacagtgacaagtttttttaaattctgaaagtcttgcatatttcctgcactgtatatttacctaagtacaagtgttttaagaatgatctcttgagcctgcttaaatcaagaacgcatatttcagcaatttgaaaaaaattgcatttctttgttcatggctgttctcggggttgagaggtatggacccaggagtcagaggtctgagtttaggcttccacctgctaactagcttggaacctctgactaggtttttaaaccctctaagtcttgggtttctcacctgtagaatgaggataataatcatgtctacctcacagtattgttgggaggacttaatgagatgtagagaaactaatctaaagcctggctcacagaaaggtaatgtgaagtctcaaaaaaagtgaattttacaatagcaaagacatggaaccaacccaaatgcccatcagtgataaagaaaatgtggtacatatataccatagaatactatgcagccataaaaaggaacgagatcatgtcctttgcagggatatggatgaagctagaggccatcatcctcagcaaactaacacaggaacagaaaaccaaacaccacatgttctcactcataagtgggagttgaacaatgagaacacatggactcaggcaggggaacaacacacaccggggcctggttggcgtgggggcaggggggtggtgcggagaggggtgaggggagggcgaacaccaggacaaagagctaatgctcgtgggtcttaaaatatagatcatgggttgataggtgcagctaaccaccatggcacacgtatacctatgtaacaaacctgcacatgtatcccagaacttaaactaaactaaaatttttttttaagtgaattttagccactagattttagagttgaagcatgccatggtacttgtgattaggcatctacctgtgtatttattcacctgaacacctggatgtgtagaataaaaattgctcaattgttgaaggctgctgcatcgctctatgctacttgttctgttaaagtatgttcagggagccagcccagagaggcacctccttttagctctgtgaggccttaaagctgggtcaccatgaagtccctgtatatatattttttgttttaataactccaagtaaccaaatgaaaacaattatttataaaatgtattaagaagtaaatgttatcaatttgggactttgcacaactattattaatgtgacctcaggtcccatgacaaattagaatggcaatcctgggtgagaagttaattttgtcctgaagctggcagaatcaacatgcaccccagttgtgggataggcctgttctctcactccatcacatccaacacctggcaaggacagcttttggtatgctaaagaatttgggaaagatgctgttggtgtaggggcggggagactagaaacaagatctttccatgggcagagctcttcagagcttgataacaaagtttggtctgcagcctttgtcaaataattataaactctccagttgaaacagggaaatgtgggctggcgtggtggctcacacctgtaattccagcactctgggaggctgaggcaggtggatcacttgaggtcaggagttcgagaccagcctggccaatatagtgaaaccccatctctactaaaaatacgaaaattagctgggtgtggtgatatgcacctatagtcccagctactcaggaggctgaggcaggagaattgcttgaacccagaaggtggaggttgcagtgggctgagatcatgccaacacactccagctgatagagtgagactctatttcaaaaaaaaaaaaagaaagaaaaacagggaaacgtttgcaaagcttccatctccaggttgacttcagtcaataatcctattgtcttaaggctggagtggacttccttgaagctctttgcccagaaaaccttgccaaaactctcctaagattattaagagttttctcgagtctcttttcctgattccaatcaactggaaatgttatgaaaataattctgtggtcaagtctcacttactcttgctctcaaacacaatccaccaaaagaacaaaacacaaagtaaaagtggatgcaagacacaagaggaagaggggccctctgcagaggctgctaagcaaacgtaggtttggctcaaagatttttgtttctttgaatcagttcactatttttaacctgtggaaatttgttcactcattctaacagtagcttttgctttgtgaaattggtttatttagtgttatgttcctcctgtaaaccttttcattgtatgtttttctcctaatctaatggtaatcctctcagtgatatgagtaacctggtgtttgtatttaacactccttcaacattcacagaatcagaaaatatcagaacaagaaagccccagccttcaagattgtttgatttgtgttccctaattttatgtgtgaacaaaactgaggctgtgaagattctagaataatatgttgagctcaaaaatatggtagtagaattagaatatagctttctaatatttgtataaaagtcaatgatatttagaagtttaaaaaagatacacattaaactgggaaaatactaaatatttaaattctgtaggctagttttcatattctggaaaggtggattttcatatggcactggtgctggtgtttcatcaggtcagctgtctatgtcataagagggtgttcttattagaaaatgtaggctttggcaagctttaaaaggtacacgtgttactgcatgttctgacgagattttgaaaatctttggcaactgtgctttccaagtggagaaaaagggctaccataatgttgaaagacggaaattaaaatctaatcagatatggtggcccttatcctccaccttagaatttcttttcgtggaatgtctggtggacagtaatatatagaggctcctcgacttaggatgggatcacatccagatacacccattgttaaattgaaaatatcataagttgaaaaatgcatttaatatacctaatctaccagacatcatagcttagcccagcctactttaaattgctcagaatgcttacactagcctgcagtcgggcaaaattatctaacacaaagcctattttgtaataaagggttaaatagctcatgtaatttattggatatagtatcagttgtttccccttgtgatcgcatcactgactgggagttgtggctcactgccacttcccagcatatatgactagcctggaaaaagatcaaaattaaaaaacaaagtacatttctactaagtgcatatcactttcacaccattattaagtcgaaaatcgccaagttgaaccatcctaagttggggaccgtctgtagatcaggcaatccttgacattttatggcggcagattgccaaaagagattggagtctagaagtcctggaagcagccccaacaattacacagaactcagcatcatgccctcacatcaaggcaaggagggagagttgtccctatttttcctttccttgaaagggatagtgaaactcattctgaggtttttaaaaaatgtactttttaatgcttttcctctatctgttttgctctcccttgataccctgtctacatcatgatggctgtggcactgctcctgctccttacatggggtcttagaatgcacaaagctgcccaatatcactttctctgtatttgaggaaaatttctagtagcaaaagaatatcctctgacactcttttcaaaatgccaactaaatgtgatagaactactttttgcaacagtgaagtcccaaagtctctttcttcctgatgggttaatttagtaccttcctttttccaaatcaaagaaccataaaagtcagtgaaaatctgcattattattatcctgtgtgtttagttttgctttttagtacttaccattattaaacacttggcccatttttggctaattgttgtgtaattccaaatacaaaccagtcaccatggattattgcagttagagtcatcagaaagcaaggagctatgactcatgctctgttcttgccatgtttttctgatttgtatttcatttcttacctgtgctcacaagtcacatgaagatcaatacatctgaaatatatatgctgactatgtcaccagattttatttctcccatcattgaatctggacaggcttctttcaaaagtgttgagtcatttttatgtctttatcacactcttctaaagtccttaaaactcctaattatttcagaggattattgtcatataaggtatacaaaatcaattatatgaagaagttgtaatcactataattaaactgaggcttatctagacagatcctgtgtcatatttttcacataatgaggctaaaaactttgtggagaaaataatggatatttatagaatatactcaagtgtatttattttagaaggtctgttagacatttcacaaaagaatctgtaatctacagaaattaccaaattatgttacataatattttaaaaacttgttttagaataagttggaatgtgaggtttataaaacaactggaataataaactgaaattataatttaatttttatacccagtgcatttatttttcttcctatgacttgactatagtttaaaattcttataggtttagtatcccttttttgaaaacaggttttcaatgtgtttctgtaacaataatgaaaagtaaaggcatgtaatctcttttccaaaataaaagattggtttgagaattatgatcatatatacaatgtactaaatgcaaccttttatgatgatgatataaaagattcacagactcacaaatcatatgccactcaactaaaatactaagagaacataactttatctttataaaacatatacataggcataaatacatagacaaaggtctagaaaaatatgcatatcagtgtggaaatgcaagtgatgataatgatttctgttgttttcttctaatttctatagagtcactatgctatttaaattttcaaaaaattaagttatgtgcaataatctttttaaaattatttgttttttaatcagctttttaatctgatgacatagaatgataacgtagtaaatcatagtttctgaaccaaaaaacagggacacatagactgagaagtgccaagttcattttagagattaaaaatacaacggcattgggacttttctagaaaattcaagatatgtggtcacaattgaggtgttcagcttctagagcgaactgaaccagatatctgctaaggctctgatagagaacagctggaagctcagaaaggtaaacataattcaaatattggtgaatatgccagtgcagccgagaaggtgacaggatttgaaaaatgtgccaggacacaatgagaaaggccttggaataaatacaaaaagcccaaactttattctgtaaaagtggggagctactgaaggttttaatcaaagcagggataatctcatttccaaggcaaaaaaacaaaaagaggcattccttcctaataccacatgtaggagctgttcttattctatggtggattattactttagtagtatcttataaagacagtgcctgaaggtcttttatctgtacattgatgtaacacttttcaaaagcatatcagcagacacatttttggaagcatgcattctgaaacttgaacttcaaataggagttatggctgatatcatggagtaaggtaaaacagaagctgactcctctccagtattcaaggctgactgttgtctctggaactgagaatactgggaaaagtgtgagttggacactgtgcacaactctaattaacactgttctaaagggaaagtatatgaatatattgtttaaacactaatagttaaaagttatactacaatatcttcaaggtttaacacataaattgagacacacacttaattaggcctaagaaagaagtggaatgtaaactcgttgattttattttcataaatgatttattttacaactatgaagaggaataatagaggccttttattagcaaagagattattatgatgtctattttcagccatgatttttctaccaatggaaagtggaactgaaaacctacttagggtgatgtgttggggttgggatcaaagagactactataactgtcctacctctgagattccagcatcacatgtggtgacaataacacttcatttagttatatttctagtgagtccagtggaatggagaaaattttttaagttaaaaattctaaaggacatatgtataatggtaggaattatttagtcttcttaataaaataaatcatttattttagaattattttgtagtctgaaagcacatttcctataatttttaaatgtgaaagcaggcaatattatcttgtaggtattgtattatattacaagagccaaagcatgctgattcccaatttcatccagtatgacttgtcttagaaaaagaaataaaaatgcagatccatttattcacttattaactgagtacatttcctgaatccatgtgcacgttgggtgataggaagctgaggccctgctggctaaagatgtaagagaacagagcctaaaactggcacaccagctggaaattaggagggcaagtttccctagaaatgggagaaccacagataggatgaaccccaaaatctgaatataaactctttccaaatacttggctgaccaccaacttatgcaaacataagggagacttcagtaggccagcctgaaacaaagcaactgcagaagctgaaaaatttagggatttgtcagttgctgcatatcacaggagagcagagcttgtagtttgagtccaggtcagctaacttcttaccagaacaataagccaatgatcaccaggagagcacaatagaactcagaaaggctgcagtgactattatctactagctttaggccctgtcctctgatatatcaagctagtaagacatgcaaggaaaccaggaatgtgataatgcctggggctgggagattatggaaattgtcagtcacccaaaactgactctaaataggcctccatgttgaatttagtagtcaaagacttcaaagcacctattgtagatatgctcaaccaaagggcattaaaagaattaaaggaaaaattgtcttaatgaatgagtagatagggaatctcaacagagaaattacattattaaaaaaatggaaattccagagctgaacaagtacaataattgaaataacaaacttgctaaacagtctcaatagcatattggagatggcagaagcaagaataagtgaaattgacaatagatttttaaaaatggcccaatcttaagaatagaaagaaaaaaatacccacaaaaaacactatcaaggagtccagcacacaaaatccaagctctgcctgtgcattaggcttcaggacatgagggaatggcagtgaattagggctgcactatgccaggaacactcatttaccacaactggatttgtcagcagttcgagtgaactttccttaggcattatagaattaactgtacttagagagaggttcttggttaacctcagtgttttcacattttaaattatttcctaagtttcaagtgaaactaaatatcatttgaaagacttttaaaggcagtctgcccaccccactccaactcaccccaatttccactaacaactacttcaaatgtaattgtcagaaagagcaccccactccactgcaccccaaatcagcctccgatagatattgcatctgaccctggggggcccttcccgctttcctcttgctatgctcactacactttatttccctcaatgaaaactccttccccaccctcctaatgtgtgacttcacattctatacatagaatttctttttttttccaaagtgaatatagttttatatattttttaactacataaaaataaaacacaatcaatacaaaaagaaatggataaaacgcaaatgtgaaaacaaactcaccaatcaccaaccactcagaactttaggtcagtttaataggtgtcctcttctgacatttcagtgtccagtctgccctccttatccatggggtctgcatccacagatttatccaaccatggatagaatatatgttttaaaaagcaaaaaaaaatatataaataaaaaccaatacagtataacaactatttacatagctatgttgtattaggtattgtaaataatctagaaataatttaaagtgtatggaaggatattcataggttatatgcaaatactacatcagttttggtgggggggatggagtctcactctgtcacccaggctggagtgcagtggtgccatctcagcttactacaacatctgcctcctgtgttcaagcaattctcctgcctcagcctcctgaatagctgggattacaggcgcacaccaccaggaccagctaattcttgtatttttagtagagacggggttttcccatgttggctaggctgatctcaaactcctgaccctgtgtgatctgcccacctcggcctcccaaagtgagccaccacgcctggctcaaatactatatcattttatatcagggacttaaacatctgtggattttggtatccaaggagggtcctagaatgaatcaccagattatggtcatctcctgaggatgattgtatatacataaattcggggtgttttacaccaatggaatcatatgcccagttttataatctgattttaatttttactcagaatgtggatatcagtccaaatcaataaatatagacaataattgacttagttcagcagagaaactggaatctcacactaagggtgaggaaggcgggagacaggagcattcagggaggggcaactcacaccttagagaccaggaaagactcaggtgtttctaagccaggggagccagtggggctgaacacaagagaatcgtgcaagctttaagaggagcatccagatccccagatctccggttcctccaggcagccccaggggtctgggaggctgggtgggaaggagatctaagtgctccctccatgacctgctgctcgactcccaccttccttccaccctcagaatttctctgtgggcctcattgtgactccgctcccctccttcccacccaggggaagccatctccacatgatggactttatctgtgtgcctcatcatgtctccactcacctctttcccatgcagggaaagcaggctccgcacagtgggctttctctgggctcctcttcttgtctcacagtctcctcctctgtggcttatgctctcaggttcctggtgcatttatcaaaccagcgctccgggtcctgctcactctcctctggctgccagtgggcagctccctgcctcccagtgttcttaagttcagcagttataattttcatctccaatgattcctttttgcaggatgctcctttttcatgattaattgctctcattttgtcaatgcagcagactcttgtgtctcactgaaagcatgaattcaggtttttagttacttcttgtttcttgtgtactgttgtgcatggaatcattttctccagttctgctcttctgaagaattgtgctgagccctgctgccctgcctggccagcatcttctcttcatatctgtagatggacagagttgttcggtgtagcaggtgccctgcgttctgtcatgggagacacagtgccttgttcaattctttcacttcccagttactgtattttttctggttggtggggctcagggggagatatccaagggttcaggagctctggccacttttccttgtgagagtttgatggggctgaacaagacagttagggaaggaggtaagccctcccttcaggtgctcagcccctctgacctctgtactgtctgccccgtggcctccagtccctcaacacacacctgcacccaggaccaagcttcctcggccctactgtgcgcagctggacccatgggctcctgcacaactggaccccagaatcctccctgcagccttcctctgccttccagccgacgcaggagctgttagtgaaggggaacagaaaaatggatccataaatccttgcttacctccctcgcaggctctcttgcctgggacagatgacatggctcctgcctgctctgctctctgtcaaaacttccccaagtattgagtctgtgggcatgaccattctctagtttctatctgtggcttggaatttgtgttaatgtattggttgggtcctttcaattggaatggggagagagaggaatccataaatctgtgactcagtgacctttaggaattggaagccaaggtctatttcttatgtcttattttgttattgtgcatagcagtgtctctcaactgtttgaatccaggcccctggagatgaatgtggactgtcagtggtgtggctttttccacctgcaccttctgcagagcagggtgcaccttgagcaccttgagcacgggcaccttctgcctgtgcacctgtgcacatgaaggagcctcttggggtcttgctgcctttggggcttttgctttcgcctccagctccttatacttctgcccatatatctcactctctgttttccagcctgtcttttctgttttctgaagtctgccctttccccttcatggttaggtgaaggaaggggaaatagaaggaaatatttgaagaggaaaggttgtggcactgcagggtatttgtgactttgtccccaattgcattcttcaagtgcagttcttggtttttagggtatctctttgagtgagattatctttaagtcttttgtccttattctgagaaaatcttataaagtttccctatatcttttcatagcctggatttctcagaaaacacatggagaagcaaagcttctgctaggttgctgtgggaaggggaagtataggcccaggcgggcagagtgagggaaggggagtggggcagagtgggcaggaaagtggacacatgtgggtccccacagagccctccagatcccatgcatagagcagctgctgccaccagcagcacagacatcttccaagggctggcagagccagggcacctgctctccaagaagggcagaggtcggcaggcatgcacagcacttaccccaaggcatggtgtcattattgctgttgctttggagcctcttatgggactggaatctgtggagaggatggagagagtaatgcatctggaatggacctcctggctccttcctatttctcatcttgatggtcacactgcacacttcccaggccgcttggccacctcactgtcatgcagccaccaggacagccagatccctgctccaagcactgcaggaggagtcctcctccagcagggtacaacctggcactgcagctgctgtgactcatgcgcatggcatcaaggcagccatgcccaggcccagctcttacctctggggaagatagacagctgacaggtcaggacacagactttggtggcaactgcccgagcacccacatagcaagttgccgaggccaggggcatgcagagccaggaaaacctgggaagatgcataaacaggcccagcccaactttgctttctgtaggtttcaggttggcagaggaaagcaaataagtgaagaaagagtggtgggggaggagcattggacagagggaaggaggccaaagacaaactcttctcactgcctgtaagtgagcaggagtctgacccccggcttttctcccagagcctgcttctggctttacagttatcactgccacactcatgagcagtatttccaatactgcacagcaagaggggctcccaaggaaatacatgtagacccaatctcagcttaggcaaaaagatttctttgctacaggatttgtcagaaccttaaaatgtcaatgtattggaatgtctgcattcagaagggctatccgagacattatactaatgtatgatggtctccactcatgtttttggaggcctcatgggagtagtgtttataggcgtcaccttaggaaatgctgccctagacttttctgactgtttgccagccccatcaggctttggatctcgtatcttcagaaatgctgtcagtattttccaaggtaaaaactagtaaagaaaaccaaacaaaaatccagaaatgtgctcagttaatagttctcctagtatcttcccagaatagcatgtgcatttcacccttgtcctggagataatgtctattacctggattataatctggaaatgaattctaactccttttattatgggcatgaccttgtttctgtactcccagcctccaaccagcaagaaaatgggggtctcagtcccacagccacaaggactgggattctgtaaatgccccagatgagctgggaggcagattcctccccagagcctgcagatggagttcagcctgcccctgacaccttgcgtgggagacactaacagggagaagagctgagcctcccccagccttctgacctacagcaccatgtgatcatgaatatgtgttattctaagccactaagttggtggtaatttgttatatagcaatagaaaacagatgcattaagtttgtctacaatgcccatgcctgcagtcatattctttggcttcctagaaggtgaccagcaatacatgtcagagtgtacaattagaaaaaaaaatacaaacaatacattatgttgtggttctcaaacgtgagtgtgcatcagaatcccctggagaagtgtattcaaacacagatttctgggacccacccctagaaattttgactcagtgtgcccgaggtggatcccaagaatttgcatttctggtaagttcccagatgatgctgttgctgctagaccaggaaccacactttgagaacactgtgttaagtcatgagctctccttttgaaaataatgatttactaagttgctgtatgtttctcaatctctactttaattgcttattttatgataaaaaatatttctataaaatgctcatagaaatgcctcttattgtgagtccagtccccattaagttgcctgtctacattgtgcttctgaatttagtcatttttccctttgggactgttctatacaccaccttattcactatttttattttcttacaaataaactttacaggaatcagcttaagaagctaacagcaattatctgcaacaagaataagtatgatgaaaatagagatgttacctgattgtggttctttattagagagtaaaggaacagagaaagaattaccccaaagctgcattgtgcatcagctgctaagtcatggcctgcttgggcaggtacgagaccagtgttaggaaatgcaataatccagacaactggagctgcagggcactggctgtcagttacccccaaaccaaggagagaagccaaggggaagactcccctcttgggctcccaaagaggtgaatgtattagatagtcactggctagagcatccaatttagtcatctttccagaacactcacggtcagatgacatgatgatgaaatatctcgtatagaaggctgatcatctcacttgattaaaaagttgtgtgacctgatttttccatagaattggcccttaatcatgagccatttttttgtcttgtatttaatatcagtcttgtgccagttccttggaatatccaactgactgatccaatcaatgaacgagtgtttatggagagtctaccaagtgccaagcaggagaacatcaattctgtcagccagtccttggaataatccaacgtggccatgtgggaggccacggcaaaggatggccaagcaccttaactgacagggttctgttcttgttcacagtggggagggtaattctccaaaattcagtcctgccactgccactggagcaagtaaggggtgtcaggcaactgtcactgtgccctgatgtgcagcgtggcatgtccacttgactctgtgacacgtctctcctcctagcccactggtagagcaggtcagagattggtcccttcttgaccatttgtactcccagtgttgatgatactacacccagatggtcagagcgaggctgcaatttcagctcttaactcatgccccggcttagcactcttctctcttagtggaagggaaaccctggtagtgccaggtttatggctgcagggctgagagcaacaaaacccatccaggcagcaggacctgctggttgggctgacagccttggagactgtgttgaacctggtcagcactggctccagcagggatggggcagagtctgtatagtgaagtctaacgtggttggccttgggtgggattctgtgtgggtctcatccttttggatggaattgcattaaatcaatgcagtgactcaagatgtttagttcatgaaaaacagtagctatgcttgccaagtatttgtgcctttgattaacttacttagaactaattaatcaccacttataatgtatacttttttaaacagactcctccaaaatggggaggcatgaatttaaaatagagtagccctattcagatggctatgatccacttgttaagcactccttagcctgagtggcctaaaaatcggagcctggggcaaaagcttatatattaattcttgatcaagggctgccatcctagggaaggaagaggggggaaagcaagagcggcaggaaggagggagagcaattcagagcgaggaaccccaagccagccacaactccacagccaaggcactggcctcattccccagggagctctgcaaagtctagtggaatatctgtgtctcagaacagccatggagggggttgggctccctcttctcctgtgctccatcttttactggtcagagtctgtcctgagagacagtcccatcatggctaggttgtcgggtcctctctgcttgggaagccagtatcttgcgggtccaggctgacacctgagaggtgggaaaaagatgtacactctctccagggggctgcaactggggaatgagatgagtgagccaccagggagatgcagctgtgtggaccaggactcagcacaaagctcatccctgaattccaaggagtgagaatgcagaagagagagctatcttccttgttgttttattaatctttgttttatgtgaaactgataggagtattcatttcctagggctgatgaaacaatataccagaaactgggtggtttcagaaaatagaaattgattcgctcctggttctggaggccagaagtccaaagtcaagatgtgcacagaaccatgctgtctcttgggctctaggagagggtctgttccatgcccctctcctggctccagcactgctgccagtccttggcactctttggctggtagatgcatcaccccaatctctgtctctggcttcatatggccttttttctggtatgtggctgtgtctctgttttctcttcttcaaaggatacctgtcattggactagggcccgctctgatacagcatgatttcatcttaactcattacatctacaaagaccctatttccaaaggtcaacttctgaggtttcaggtagacataaaatgtagggtgttgagggaggggggaagccagtcctataaaatacgctgaaattaactatcttccagcaggtaaatagttgataacctctatatcaactgcatattagactaaatcctatttaattggactggagttgggctcaggcattttttcatttacctcaagtaattctatatatatatattttattatcatcagcattatatcactgattataatgcaattggtaacatttattggacagttactgtgtctcaggcactgggctgagtactttatgtatattataccaatgactcatcattccagttcttcatcttacagataggaacacaagagtcaacaatgttggaaaatcgccagaggacacagacctgggagcggccaagtcaagacatccaggctgtctggctccagaactaggactcgtctttgccaagagaacccagaacatatttagaacctttcatcttcttctcgtctttagacagtctcagttatttagagaaattgtaaacattttaagatgcgtaactgcaagccttcactacaaagaaataaaacagcctggagagagaggggctgacgtatcatatgtatcttgtacaacctgaggatgagtcaccaagggcagaagttaataaatgacaggaattattattcaaacagatttaatactttcatgtctcccaatttcacaagtttagaaaaaaagtgatgcatttagaagacatctctccctcctatttcgaagcttagctgcctaacctacagtaaagcctgatagttatgaaccttggagaacagcttctatgacaagtgaggatctaagagcctatatctcataatgatgcctctctgcattaaactaaatcaccccattctgggcaatcattgcagatcccctggtttcctgtcttggccctggacccacactcccttccccatcaaaggtgggatggggagaagcagctgcccagcttaaaacagtgtacttcccagtcatgtgccaggcagaaccttgttggcacccacgtttctgtctctgtggctggacctgctcctcatcttgtcttcagtgcccttctttttcctttgatttctacctaaatccagctcattgtgggaccttctctggtccaaccttcttcaagtctccagctgctcttacctccatgggccatttctttgtttgaaattatcttacatttagtcgattccattctgtttagatctcagctgctctacatttgcttcacagaaattgaccttggctcccaaactatataacaagtacctcccagggacagaaacaaggtgtgtatatgcctggtattcctcccagccttctcggcataatgccaagcaaacaaaattggagtgatctccaacatacctgataattactctttatacctgtagtataagaagtgttaactttttgacattaaatgaaggtgcccaaatagtgccatcagatcatgttaaaattttttcatggtgacccaaattaataatgacatcctttttcctcatggaaacccaaaccaaattattatttatgattactataatttttagccattattaggctctgttatggtactgtgtggttgattaaaaatggaagttgcccatggaggtctacatgtcattgttttggccagtgcaaaatgtagccaggagcacaccacacctgacagtatcagtgattattattattattattattatttttaatactgatgaagagtttagtgactcctgatttcaagctaagagctgattaggaaaggttccattgacaactcatccctagaaaattaaaacagaagcacatagatattgcaatttgacttcagagacttccctttctcctagaacaatgcacaccgcaaatgagggctatttccgatggcttataactaaagtaaaatactgtgatatcgtctaatcttagaatctcttaagtgagaatttgttcaagagggctaacctagaacccagtggaaaaatccagctgatggtcacctgggtccattccctatggtctgaggagcaaatgaggcccctctcctgagtttatttatttatttatttattttatttatttatttattattattatactttaagttttagggtacatgtgcacaacgtgcaggtttgttacatatgtatacatgtgccatgttggtgtgctgcacccattaactcgtcatttagcattaggtatatctcctaatgctatccctcccccctccccctaccacacaacagtccccagtgtgtgatgttccccttcctgtgtccatgtgttctcattgttcaattcccacctatgagtgagaacatgcggtgtttggtattttgtccttgtgatagtttgctgagaatgatggtttccagcttcatccatgtccctacaaagaacatgaactcatcattttttatggctgcatagtattccatggtgtatatatgccacattttctatgccttttgaatacttgcattattttctgccttgcttcttacctttgacctttgtaaatgggagattatttgttgctcttgttttaaggataatttagaaatgacaactttagcatatatctaataattacttgccccagcatttcatcattacaactcaaattaacataatgtctgtttggattttaacaaagaagaaaagctaagaaaaaccttcacttggaaacccttcaaaagtttctcatttggctacagttactcaggctttctgcaaaacgaagcaatgttatccttacattacaccaacagttgtttgagtcttttatcagactgactttctgctcatgccaaaaggcgtcattttctttgtgtaaaagtgactttgaagattaataagtaacagaatgggtacacatggatttatgaacatttaaaattgcttaatgtttttgcatgtgtatactttgaaaaaaaataggagatgccccagttgttctacatagattgccttaggagaaggacataaatgtgcgtcattgattcagacttaagtgaattgttggtgatccacaatgatctcccattgacaagaggtgggtttttggtctcccaaggaactacaacaagcttttagtactttatatcagaaaaaagtacttagcctgtgaagctcatggctttggtgcccgctaatctctctttaaacacgaaagatacatcgcaggcccagagctgttgcatcagcaggcaggcagcaagctgagagctgattaggaagcgtcagcccctagaggcagaggtctgccccctgactctatgagcaagagtcaacatcaagcccttcaatccttgggcctgcagttttccctgtacaggaaacacaagcgtgtgtggatgtgtgtgcatttctttagaaacacataatttgtttgttgctttattttctacctttgaaagatggcaagatcccagtcacaaaaacagaaaccaggctaggtattttaaccagagagggatttaataaaagcgttaggatttgagctgttttggaagagctgaagaagaaggagaggacaggggtcaggaaggacagttcctgcagtgtcctgccctgctgggtggccattacaaagctggcagctgtggggcagtatccctttgcccccatgtggccaggcacacggggcactggctgactcccacagccaccactgtcaggattggagctggagctgctgccacagccagaagcagaatgtccactacctccctcctaccttctgattttgcactagctccctactggtacaacctacacagaaccctgccagtaaaggaatctgagaaatgtagtcccctgaggtacagaaaacacagaagggcaggcagtatctggcccagatgcctatcataaagctttagaaaatgttgtgttatcgctgcactttaaccattgaagtatttattttaaattgattcttatttaaatatcaaatataagagaaatcctatttgactatgccttttatgggacagtcaagaagataatcagtattatattaaagaatattttatgggtttaaagaatattttgggggcattttaattcacatagttcaaaagcagctgaatacatgtattaaaaggcaagctcttgataggccttgctatgtcatctacgaaaagcactcctgtttgcctctgctagctaactcagctatttgaagtacagatggatgaagcaaattctactgtttgggtttttatatttgacactggttgatacttttccaaagcaaatgttgcatttccgctggtagtttgatttcgctgtttgctttctgaaattctatgtacttttattttagtacatagaataactatgcctgcttaattccaatgagaaattatttcagataaataatcatcaacttgtttacttaaaataaaatttttgtacctcgaaaaaccaaaattgataataaaaatcctttaaaatgaccatgattacaactattatgcatatctgtaaatctctttacttcttacatcttgactgatcatctcagcaactctgtgagaagccaactactactgcctccaaattttttccaactatgttaggtgacaggtcattagctgtaaaaccaaggcaagaagttggactttataagtaaatacgatagtttacttatgaatatgtatttatgagactcctcaaaattcatattccaaccacattaattttctcttcatgctagagtctaatgcagtggttagactgcagcatgaaactggggtaagcataccacttggagatttgcaaagatgatcacaggaattgtcggcctggataattttaagggagccagttttcagatcctcaacctacattcgtactctttcccaaaacaaattcgtctaagaatatgtcccttttaaggatgcaggttcctacccaaaattgtacttttcccactttgcaaaattaatcatgcctctctctcatctttctctgaggcattgacttgaagttttaaaatcttcagggcaacaaacaatgggacaatttgacatattgttccagtattaagaaagtaactttcttaatgtaagactaattataagtaaatgtaaatgactgatgacttaattaaacaactttttgtaagtctgatggtttccatttttttccttagagcagaactgtaggagaacttacatgacatgctggctaataaaaaagtaaaaataatttggtgatagatcactgtgaatcttggcatacagctgagaaggaggttaaagaattgagtaacatttctgtagcaaaactcccttcattcccactgatttatttatatggaaaaatcttcttggcccataaatttataaaaatgaaaaacagaaatagaattaattttgagccctaactcattctagtaataaataatatatccactgatttcatgacctaactagaaaaacttagactcgcttttggccatggagacatacatttccaacaaaattttacttctgcataataattatttcttaaaatttattacatcttatttttttatcaattatgatctaaagataattgtaattataacccaagcagaaaaaatccaatatttagagacttattgccacaggaaaattttaaaaattaaatgtcaatttatatatgtaacttattgtacatagaagtatggtgacaaaacctataaaatattttctacacgaaatacattacattagaataaaagtctgtggaaatgaaaataagagctcaaagagaaaaaaattgatgtcaaatttcagactattaaagaacagtctgtttatagcaattggacacctgatagcatataatattcatactctattgcagccatcccttcctttttggcactagggaccagttttgtggaagacaattattccatggatggagggagtgggggctgttcggggagatggtttcaggtgaaactattctacctgagatcatcaggcattagttagattctcataagaagtgcgcaaccgagatttcatgcgccgcccacaatagggttcacgctcctatgagaatctaatgccgctgctgagctgacaggaggcagagctcaggcagtaatgctcgtggcccactactgctcacctccttctgtgcggtctggttcctaacaggccacaaactggtactggtccatgactcggtggttggggactcttgctctattcaatacgcttaaaagaatgatgttggccaggcgcggtggctcactcctataatcccagcactttgggagtttgaggtgggcagattacgaggtcaagagatcgagaccattctggccaacatggtgaaaccccatctctactaaaaatacaaaaattagatgggcgtggtggcgcacacctgtagtcccagctactcaggaggctgaggcaggagaatcgcttgaacccgagaggcagaggttgcagtaagcagagattgctccactacacttcagtctggtgacagagcgagactccatctcaaaaaaaaaaaaaaaaagaacgatgttataacaacatagtatactgaaaattacatcctttgcagttatttaaacaaaggatatttatgtgttaatgtaaacatacgtatgtgatacattttcaaaatttatttaaagagtatatgagcaaaaatctttacagatcattgatctatacaaaagataaggtgttttgaagatctgcattctggcatgtctccatgtgtgttttctttgttttctcag
